(19) United States
(12) Patent Application Publication
(10) Pub. No.: US 2025/0170188 A1
(43) Pub. Date: May 29, 2025

(54) BACILLUS CLAUSII STRAIN, COMPOSITIONS THEREOF, AND METHODS OF USE

(71) Applicant: DEERLAND PROBIOTICS & ENZYMES, INC., Kennesaw, GA (US)

(72) Inventor: John DEATON, Kennesaw, GA (US)

(73) Assignee: DEERLAND PROBIOTICS & ENZYMES, INC., Kennesaw, GA (US)

(21) Appl. No.: 18/712,476

(22) PCT Filed: Dec. 8, 2022
(86) PCT No.: PCT/US2022/081161

§ 371 Date: May 22, 2024

(30) Foreign Application Priority Data
Dec. 8, 2021 (IE) 2021/0209

(51) Int. Cl. A61K 35/742

(52) U.S. Cl. CPC A61K 35/742

(57) ABSTRACT

The invention provides a Bacillus clausii strain comprising a purified microbial population that comprises one or more bacteria with a gyrB that shares at least 97% identity with SEQ ID NO: 1; and/or that comprises one or more bacteria with a 16S rRNA that shares at least 97% identity with SEQ ID NO: 2. Optionally, the Bacillus clausii strain shares at least 97% identity with SEQ ID NO: 3. Compositions and methods of using the Bacillus clausii are also part of this invention.

### FIELD OF THE INVENTION

[0001] This invention relates to a new Bacillus clausii strain, which alone or in combination with other Bacilli strains can be used as probiotics or together with a prebiotic and a symbiotic. The invention also relates to a composition such as a pharmaceutical composition, dairy product, functional food, nutraceutical, dietary supplement, and product for personal care comprising the new Bacillus clausii strain alone or in combination with other strain(s), as well as use of the strain for prevention or treatment of gastrointestinal, urinary tract, vaginal, and other infections and diseases, and other uses.

### BACKGROUND OF THE INVENTION

[0002] Probiotics are live microorganisms or microbial mixtures administered to improve the patient's microbial balance, particularly the environment of the respiratory and gastrointestinal tract. Bacillus strains have been employed for the treatment of respiratory infections, prevention of diarrhoea, as well as, for the treatment of immuno-related diseases (Elshaghabee et al., 2017).

[0003] The normal intestinal flora is dominated by various bacterial species, which produce substances that help control the growth of pathogens. Dysbiosis is a condition that is characterized by a decrease of the certain bacterial species and an increased growth of pathogenic bacteria. Dysbiosis has been associated with the development of periodontal disease, inflammatory bowel disease, and chronic fatigue syndrome. Some studies have suggested patients with dysbiosis may have an increased risk of developing metabolic and cardiac disorders (Chan et al., 2013).

[0004] By administering probiotic Bacilli, it is possible to regenerate the intestinal flora of men and women with recurrent episodes of dysbiosis. Dysbiosis is a common gastrointestinal problem. Dysbiosis caused by Escherichia coli is also a common problem (Chan et al., 2013).

[0005] The presence of Bacilli is important for the maintenance of the intestinal microbial ecosystem. Bacilli have been shown to possess inhibitory activity toward the growth of pathogenic bacteria such as Listeria monocytogenes, Escherichia coli, Salmonella spp. and others (Yilmaz et al., 2005). This inhibition could be due to the production of inhibitory compounds such as organic acids, hydrogen peroxide, bacteriocins or reuterin or to competitive adhesion to the epithelium (Abriouel et al., 2010).

[0006] Bacilli have also been examined as a treatment of respiratory tract infections (Marseglia et al., 2007). For example, the installation of Bacilli, and stimulation of indigenous organisms has been employed to prevent recurrence of urinary tract infections (Marseglia et al., 2007). The role of Bacilli in preventing intestinal infections has also been investigated.

### DESCRIPTION OF RELATED ART

[0007] The importance of Bacilli as probiotics has been described in the literature.

[0008] Hyronimus et al., 2000 discloses the screening of probiotic activities of a number of Bacilli strains by in vitro techniques and evaluation of the colonization ability of thirteen selected strains in humans. The strains were examined for resistance to pH 2.5 and 0.3% Oxgall adhesion to Caco-2 cells and antimicrobial activities against enteric pathogenic bacteria (Khochamit et al., 2015). Bacilli have been shown to possess the primary requirement of GIT stress tolerance, besides having good adhesion and bio-therapeutic properties (Thakur et al., 2016).

[0009] Pharmaceutical compositions of Bacilli known in the art are not sufficiently efficient in recolonizing in vivo i.e., mammalian microbial ecosystems, and there is, therefore, a need to find Bacilli with an inherent ability to recolonize upon administering the Bacilli in the form of a pharmaceutical composition, a nutraceutical, a dairy product, a functional food or absorbent product. Bacilli isolated from soil may have the ability to recolonize in vivo upon administration because of their inherent ability to survive in the human microbial ecosystem. It is often a cumbersome process to identify Bacilli strains with enhanced abilities to colonize upon administration and it is therefore important to select useful test systems to predict their in vivo ability to colonize.

[0010] In the literature, there seems to be a large variation in the reported in vitro adherence of probiotic strains. This variation indeed reflects biological differences between strains, but certainly also depends on experimental conditions. Moreover, there also seems to be variation with regard to how to measure the adherence. In some cases, it may be argued that an in vitro experiment only serves as a means to estimate the in vivo ability to colonize by adherence to epithelial cells.

[0011] Despite being long considered soil microorganisms, Bacillus spp. have been used for more than 50 years in the form of fermentation products or spore-based supplements (Cutting et al., 2011). Bacilli, being ubiquitous in nature, consistently enter the gastrointestinal and respiratory tracts of healthy people through food, water, and air (Benno & Mitsuoka, 1986). They have been isolated from the gut and can reach up to 10⁷ CFU/g and hence are considered to be one of the dominant components of the normal gut microbiota (Lakshmi et al., 2017). More recently, strains of Bacillus clausii have been isolated in order to provide more specific functions and its safety has been evaluated. Bacillus clausii has been previously used in diarrheal patients (Sudha et al., 2013, Horosheva et al., 2014) and children with recurrent respiratory infections (Marseglia et al., 2007) with no adverse events reported. Though the countries and strains are not specified, Bacillus clausii has been commercialized in 55 countries around the world (Nista et al. 2004; Gabrielli et al. 2009). The literature review for Bacillus clausii showed no adverse events related to the probiotic and the worldwide presence of bacteria in different countries supplements the narrative of its safety for human consumption.

[0012] In summary, Bacilli strains with probiotic capabilities should be able to adhere to other suitable cells, such as the cell line Caco-2 cells. Moreover, it is also desirable that the Bacilli strains with probiotic capabilities show in vitro inhibitory activity against other bacterial species, produce acid after growth in liquid culture and/or produce hydrogen peroxide.

### SUMMARY OF THE INVENTION

[0013] It is an object of the present invention to provide strains and compositions as described throughout this application such as pharmaceutical formulations or absorbent products of suitable probiotic strains such as Bacilli strains with desirable properties. In an embodiment, the present invention concerns the Bacillus clausii strain CSI08 alone or in combination with other Bacilli strains such as Bacillus megaterium strain MIT411 (disclosed and claimed in corresponding PCT Application PCT/US2022/xxxxx claiming priority from Irish Patent Application No. 2021/0211, whose contents are incorporated herein in their entirety) and Bacillus coagulans strain CGI314 (disclosed and claimed in corresponding PCT Application PCT/US2022/xxxxx claiming priority from Irish Patent Application No. 2021/0210, whose contents are incorporated herein in their entirety). In an embodiment, these strains have similar or essentially the same advantageous properties e.g. the ability to colonize by adherence to mucosal membranes/surfaces and which are therefore suited for the treatment or prevention of infections or diseases of the vaginal, urinary-tract, gastrointestinal, naso-sinal, pharyngeal, esophageal, oral, and/or other areas of the body with mucosal membranes, as well as, the treatment or prevention of infections or diseases of the skin and/or other areas of the body having epithelium; immune health, protection against oxidative stress, cleansing and detoxification, metabolic health and cardiovascular health amongst others such as providing antimicrobial activity, anti-inflammatory activity, suppression of pro-inflammatory response, activating and/or provoking immune response eg. by stimulating macrophages, providing immunoprotection, aiding in digestion and/or fermentation for instance in the gut, producing branched amino acids, essential amino acids and group B vitamins, maintaining healthy gut and/or skin, protection of mucosal and other epithelial tissues from toxic agents, decreasing incidence of loose stools, improving the gut-brain axis, and treating and/or preventing dysbiosis and its effects such as periodontal disease, inflammatory bowel disease, chronic fatigue syndrome, metabolic disorders, cardiac disorders, respiratory tract infections, urinary tract infections, GI infections, and diarrhea; and restoring normal and/or healthy flora. In an embodiment, the present invention allows the use of Bacillus clausii strain CSI08 and compositions for use in fecal transplants.

[0014] Gastrointestinal diseases include, but are not limited to, treating gastrointestinal irregularity in an individual, wherein the individual has at least one 24-hour episode per month of bowel movements measuring 1 or 2 on the Bristol Stool Scale (i.e. treating constipation; or wherein the individual has at least one 24-hour episode per month of bowel movements measuring 6 to 7 on the Bristol Stool Scale (tending towards diarrhea), wherein the frequency of the individual's 24-hour episodes per month of bowel movements measuring 1 or 2 (or 6 to 7) on the Bristol Stool Scale decreases.

[0015] Also included is a method of restoring gastrointestinal regularity in an individual, wherein the individual has at least one 24-hour episode per month of bowel movements measuring 1 or 2; or 6 to 7 on the Bristol Stool Scale, wherein the frequency of 24-hour periods of the individual's bowel movements measuring from 3 to 5 on the Bristol Stool Scale increases.

[0016] The invention further includes maintaining healthy gut microflora, with Bacillus-containing composition(s). The Bacillus-containing composition(s) can be used as probiotic supplementation of the gastrointestinal microflora, and may compete with or otherwise discourage pathogenic bacteria in the gut such as Escherichia coli, Listeria monocytogenes, Salmonella spp.

[0017] Another object of the present invention is to provide pharmaceutical formulations with an increased ability to colonize by adherence to the mucosal membrane by employing mucous adhesive excipients.

[0018] It is a further object of the present invention to provide vaginal formulations with an increased ability to suppress the growth of Candida albicans and Gram-negative pathogenic bacteria.

[0019] It is yet another objective of the present invention to provide compositions such as dairy products, nutraceutical products and functional foods comprising Bacillus clausii strain CSI08 alone or in combination with other Bacilli strains such as Bacillus megaterium strain MIT411 and/or Bacillus coagulans strain CGI314, in an embodiment, having essentially the same properties, in an embodiment having the ability to colonize mucosal membranes and therefore adapt to treatment or prevention of vaginal infections, urinary-tract infections and gastrointestinal diseases. Compositions of the present invention may be administered for 1 dose, 1 day, 1 day to 1 week, 1 day to 1 month, 1 month to 45 days, 45 days to 2 months, 3 months, 6 months, 1 year, or more, including any timeframe identified and/or falling within these ranges.

### FIGURES

### In the Drawings:

[0020] FIG. 1 illustrates the genome analysis of Bacillus clausii CSI08.

[0021] FIG. 2 illustrates the phylogenetic tree (16S) of Bacillus spp, arranged in clades.

[0022] FIG. 3 illustrates the phylogenetic tree (gyrB) of Bacillus spp., arranged in clades.

[0023] FIG. 4 shows the stability of MuniSpore in PBS during a pasteurization process.

[0024] FIG. 5 shows pH Survivability of B. clausii CSI08 spores at 0-, 3-, and 24-hour timepoints.

[0025] FIG. 6 shows bile salt survivability of B. clausii CSI08 spores at 0-, 3-, and 24-hour timepoints.

[0026] FIG. 7 shows survival of Bacillus clausii CSI08 spores and L. rhamnosus GG under gastric and small intestinal digestion conditions simulated in vitro.

[0027] FIGS. 8 and 9 show antimicrobial activity of Munispore (B. clausii CSI08) in liquid culture.

[0028] FIG. 10 shows total antioxidant capacity of B. clausii CS108 and L. rhamnosus GG.

[0029] FIG. 11 shows the cytoprotective effect of the vegetative form B. clausii CSI08 on H₂O₂-exposed epithelium.

[0030] FIG. 12 shows the survival rate of C. elegans N2 fed with 10⁸ and 10⁹ CFU/ml B. clausii CSI08, followed by oxidative stress caused by H₂O₂. NGM-control-fed nematodes; Vit C-positive control.

[0031] FIG. 13 shows the effect of vegetative cells B. clausii CSI08 on HT-29 cell viability. B. clausii CSI08 compared with untreated cells (medium).

[0032] FIG. 14 shows adhesion of vegetative cells and spores B. clausii CSI08 to the HT-29-MTX. B. clausii CSI08 compared with L. fermentum.

[0033] FIGS. 15A and 15B show the modulation of LPS-induced pro-inflammatory response by B. clausii CSI08 in HT-29 cell line, and the pattern of gene expression after co-incubation of HT-29 cells with B. clausii CSI08 and its CFS in unstimulated conditions (LPS-).

[0034] FIG. 16 shows modulation of LPS-induced IL8 gene expression by viable and heat-killed B. clausii CSI08.

[0035] FIG. 17 shows NF-κB levels in the nuclear fractions of control HT-29s, cells exposed to LPS, and cells treated with B. clausii CSI08 prior to adding LPS.

[0036] FIGS. 18A and 18B show modulation of PolyI·C-triggered pro-inflammatory response by B. clausii CSI08 in HT-29 cell line. qPCR analysis of IL-8, TNF-α, IL-17C, and CXCL10 gene expression 4 hours after exposure to PolyI·C in HT-29 cells preincubated with B. clausii CSI08 or its cell free supernatants (CFS).

[0037] FIG. 19 shows immunostimulatory effect of CSI08. Cytokine levels in cell culture supernatants of U937-derived macrophages challenged by vegetative cells B. clausii CSI08 or LPS for 5 hours.

[0038] FIG. 20 shows the lifespan of C. elegans wild type N2 strain in control conditions (NGM) and lifespan of C. elegans wild type N2 fed with B. clausii CSI08.

[0039] FIG. 21 shows the lifespan of C. elegans daf-16 mutant worms in control conditions (NGM) and lifespan of C. elegans daf-16 mutants fed with B. clausii CSI08.

[0040] FIG. 22 shows B. clausii CSI08 is slightly caseolytic using streak method, as well as B. megaterium and B. clausii CSI08 caseolytic activity.

[0041] FIG. 23 shows proteolytic activity determined by EnzCheck® kit assay.

[0042] FIG. 24 shows concentrations of essential amino acids and vitamins in overnight cultures of B. clausii CSI08 determined by RP-HPLC-FLD and RP-HPLC-MS.

[0043] FIG. 25 shows a graphical flow chart of the study design.

[0044] FIG. 26 shows the probiotic cocktail administered during the study significantly decreased the incidence of loose stool over the course of the study as compared to placebo control.

[0045] FIG. 27 shows no effect of any treatments administered during the study on percentage of hard stools as compared to placebo control.

[0046] FIG. 28 is a boxplot showing the Chao1 values distribution in each experimental group for Day 1 and Day 45 of the study. Dotted lines connect the paired samples. A paired Wilcoxon test was used to compare the distribution of the groups.

[0047] FIG. 29 is a boxplot showing the Chao1 values distribution in each experimental group for Day 1 and Day 45 of the study. A Wilcoxon test was used to compare the distribution of each experimental group against the Placebo.

[0048] FIG. 30 illustrates PCoA clustering performed on the Bray-Curtis dissimilarity matrix.

### DETAILED DESCRIPTION OF THE INVENTION

### Genotypic Identification

[0049] The Applicant collaborated with Cornell University (Ithaca NY, USA) for genomic sequencing and identification.

### WGS DNA Composition

[0050] The whole genome sequence (WGS) was carried out by Cornell University.

[0051] The whole genome sequence was obtained for the Bacillus clausii isolate, assembled, and annotated by Cornell University. Bioinformatics analysis was completed at Cornell University and at Deerland Probiotics and Enzymes (Kennesaw GA, USA). DNA nucleotide content, base pair lengths for Bacillus clausii CSI08 genome, and marker sequences are shown below (Table 1). The genome size (4.2 Mbp) and % GC (44.6%) of Bacillus clausii CSI08 is consistent with that of a previously sequenced Bacillus clausii strain (4.3 Mbp and 44.6%, respectively) (https://www.ncbi.nlm.nih.gov/genome/?term=txid66692 [Organism:noexp]).

TABLE 1
Whole genome sequencing metrics of CSI08

| | | Number | Total | | | Average |
|---|---|---|---|---|---|---|
| | | of | length | | | coverage |
| Strain | Attempt | contigs | (nt) | GC (%) | N50 (nt) | (x) |
| Bacillus | 1 | 52 | 4,264,753 | 44.66 | 281,140 | 41.0102 |
| clausii | | | | | | |
| CSI08 | | | | | | |

gyrB Gene

[0052] Identifying gyrB gene polymorphism was carried out by the Applicant. The gyrB gene encodes DNA gyrase subunit B. DNA gyrase negatively supercoils closed circular double-stranded DNA in an ATP-dependent manner to maintain chromosomes in an underwound state.

[0053] Gene sequencing analysis using the gyrB gene polymorphism, a well-established method for species level discrimination of prokaryotes (Bavykin et al., 2004; Wang et al., 2007) showed that Bacillus clausii CSI08 was most closely related (>99%) to the Bacillus clausii group (Table 2).

TABLE 2
Distance matrix of gyrB gene

| Bacillus clausii subsp. | B106 | UBBC-07 |
|---|---|---|
| CSI08 | 99.983 | 98.952 |

[0054] The representative genomes were previously reviewed, curated by NCBI, and coordinated with the UniProt Consortium (NCBI, 2016; UniProt, 2016). R package SequinR coupled with the UniProt Consortium analysis was used to compare whole genome sequences (WGS) and GyrB sequence of Bacillus clausii CSI08 and two reference sequences (Table 3) for base pair length and GC content. Independent whole genome sequence (WGS) analysis by Deerland Probiotics and Enzymes identified CSI08 with a homology most similar to Bacillus clausii B106.

TABLE 3
Whole genome sequence comparison

| Bacillus clausii | | | Sequence |
|---|---|---|---|
| subsp. | Accession No. | % G/C | Length |
| CSI08 | JABBNL000000000.1 | 44.66% | 4,264,753 |
| B106 | GCA_002266625.1 | 44.63% | 4,253,129 |
| UBBC-07 | GCF_000981315.1 | 44.63% | 4,197,324 |

16S rRNA

[0055] Whole genome sequencing and 16S rRNA analysis for the presently claimed strain (Bacillus clausii CSI08), as compared to the two reference strains, exhibited an average nucleotide identity (ANI) score for 16S rRNA of >99% when compared to the B. clausii strain B106 (the genome sequence of Bacillus clausii B106 has been deposited in GenBank under the accession number. NFZO00000000). The genome size (4.2 MBP) and GC content (44.6%) for CSI08 was comparable to the two reference strains.

### FURTHER DEPOSITS AND ACCESSION NUMBERS

[0056] The whole genome sequence of Bacillus clausii UBBC07 has been deposited at DDBJ/ENA/GenBank under the accession no. LATY00000000.

[0057] Genome sequence data of Bacillus clausii strain CSI08 (Munispore) was deposited into NCBI GenBank database, and the genome sequence was annotated with the NCBI Prokaryotic Genome Annotation Pipeline (PGAP). The genome is publicly available, with GenBank Accession Number JABBNL000000000.1 for the strain, and available for instance at the link: Alkalihalobacillus clausii strain CSI08, whole genome shotgun sequenci-Nucleotide-NCBI (nih.gov).

[0058] Genome sequence data of Bacillus megaterium strain MIT411 (Renuspore) was deposited into NCBI GenBank database, and the genome sequence was annotated with the NCBI Prokaryotic Genome Annotation Pipeline (PGAP). The genome is publicly available, with GenBank Accession Number JABBNK000000000.1 for the strain, and available for instance at the link: Priestia megaterium strain MIT411, whole genome shotgun sequencing pro—Nucleotide—NCBI (nih.gov).

[0059] Genome sequence data of Bacillus coagulans strain CGI314 (Fortispore) was deposited into NCBI GenBank database, and the genome sequence was annotated with the NCBI Prokaryotic Genome Annotation Pipeline (PGAP). The genome is publicly available, with GenBank Accession Number JABBFU000000000.1 for the strain, and available for instance at the link: https://www.ncbi.nlm.nih.gov/nuccore/JABBFU000000000.1.

### Phylogenetic Placement Deerland Probiotics and Enzymes, Inc.

[0060] Genome-to-genome distance calculation (GGDC), a digital gold standard, is as reliable as DNA-DNA hybridization (DDH) (Auch et al., 2010). GGDC holds more discriminatory power for subspecies delineation and subsequently, was used as a confirmation of multiple alignment and phylogenetic analyses. GGDC yielded three calculation-based models that further verified Bacillus clausii CSI08 is a close relative to Bacillus clausii B106 (Table 3).

[0061] Although the conserved 16S rRNA sequence is a well-established method to compare and study phylogenies in bacteria, the high percentage of sequence similarity between closely related species limits its usefulness (Wang et al., 2007). High rates of 16S rRNA sequence similarity in closely related bacterial species are due to a slower rate of molecular evolution. Past research (Bavykin et al., 2004; Wang et al., 2007) supports the validity of using gyrB sequences as taxonomic biomarkers due to their rate of base substitutions and significant and reliable correlation with DNA-DNA Hybridization analysis (Dauga et al., 2002; Kasai et al., 1998; Wang et al., 2007). The gyrB encodes DNA gyrase B, and type II topoisomerase that plays an important role in DNA replication. Gyrase B subunits are encoded by the gyrB gene.

[0062] Phylogenetic analysis using the neighbor-joining (NJ) method (Saitou & Nei, 1987) placed Bacillus clausii CSI08 in a clade with Bacillus clausii B106 (FIG. 2). This confirms all previous genomic identity determinations. Bacillus clausii B106 has been placed in the Bacillus clausii group.

### Definitions

[0063] By “excipient” is meant any non-active ingredient that is added to form part of the final formulation.

[0064] By “probiotic” is meant a viable microbial supplement, which has a beneficial influence on a subject through its effects in the intestinal tract, urinary tract, vaginal tract, and/or other areas of a subject's body.

[0065] A “prebiotic” is used herein as a substrate, which has a beneficial effect on a probiotic and thus on a subject taking (e.g. administered) the probiotic. Suitable prebiotics may be selected from an inulin, an oligosaccharide, and/or a vitamin.

[0066] A “subject” as used herein includes a person suffering from any clinical condition related to a microbial imbalance as well as a person using bacterial preparations prophylactically, for wellness, or any other purpose including for instance benefitting from the administration of Bacillus clausii strain of this invention (e.g. CSI08). Optionally, the subject is a human, a patient, and/or a mammal.

[0067] By a “symbiotic product” is meant a combination of probiotic and prebiotic, which is synergy, have a beneficial influence on the patient.

[0068] By “hardy growth” is meant that bacteria show excellent growth.

[0069] The abbreviation “CFU” means colony forming units.

[0070] The present invention relating to a probiotic Bacilli strain capable of regenerating the in vivo flora in subjects will become apparent in the progress of the following detailed description.

[0071] According to a first aspect, the present invention comprises Bacillus clausii strain CSI08 alone or in combination with other probiotic Bacilli strains with essentially the same properties. Such other probiotic Bacilli strains include, but are not limited to a Bacillus coagulans strain and a Bacillus megaterium strain. Such other Bacilli strains further include a Bacillus coagulans strain and a Bacillus megaterium strain each filed today under these respective titles-their contents are incorporated herein in their entirety.

[0072] SEQ ID NO: 1, as recited in the claims attached hereto, comprises gyrB of Bacillus clausii CSI08.

[0073] SEQ ID NO: 2, as recited in the claims attached hereto, comprises 16S rRNA of Bacillus clausii CSI08.

[0074] SEQ ID NO: 3, as recited in the claims attached hereto, comprises the assembled whole genome sequence of Bacillus clausii CSI08.

[0075] The Bacillus clausii CSI08 strain claimed herein, with reference to at least 97% identity to SEQ ID NO: 1 and/or 2; or to at least 97% identity to SEQ ID NO: 3, has the following properties:

[0076] In order to determine the genus and species of the strains disclosed herein, the whole genome was sequenced. The amount and composition of the strains were identified and determined.

[0077] The strain was shown to possess little to no antibiotic resistance and no safety concerns.

[0078] The strain was found to show stability toward acid and bile and showed heat tolerance. The strain produced a natural antibiotic substance in the form of bacteriocins.

[0079] According to a second aspect, the Bacilli strain of the present invention is suitable for medical use in preventing or treating vaginal infections, urinary tract infections and gastrointestinal diseases, as well as, improving immune health, protection against oxidative stress, cleansing and detoxification, metabolic health and cardiovascular health.

[0080] In another preferred embodiment, a composition such as a pharmaceutical composition is provided comprising Bacillus clausii CSI08 alone or in combination with other probiotic Bacilli strains with similar and/or essentially the same properties, together with a pharmaceutically acceptable carrier and/or diluent. Such other probiotic Bacilli strains include, but are not limited to a Bacillus coagulans strain and a Bacillus megaterium strain. The bacterial strains are formulated into compositions such as pharmaceutical formulations in order to allow the easy administration of the probiotic strains and by means known to the man skilled in the art.

[0081] Bacillus coagulans has been proven able to alleviate symptoms of irritable bowel syndrome (Sudha et al., 2018), improve muscle integrity and cytokine response (Gepner et al., 2017; Jager et al., 2018), modulate the gut microbiome and the immune response (Kimmel et al., 2010), reduce function intestinal gas symptoms (Kalman et al., 2009), reduce the instance and duration of diarrhea (Dolin et al., 2009), improve the symptoms of functional abdominal pain and bloating (Hun et al., 2009), protect against acetaminophen induced acute liver injury (Neag et al., 2020), enhance butyrogenesis (Sasaki et al., 2020), reduce severity of bacterial vaginosis (Sudha et al., 2012), and reduce cholesterol (Sudha et al., 2012) all in vivo. Bacillus coagulans has also shown to induce immune response and anti-inflammatory action (Jensen et al., 2017), improve plant protein digestion (Keller et al., 2017), adhere to Caco-2 cells (Sharma & Kanwar, 2017), improve colonic microenvironment in patients with ulcerative colitis (Sasaki et al., 2020), reduce the adhesion, cytotoxicity and induction of apoptosis caused by S. typhimurium in HT-29 cells (Kawarizadeh et al., 2019), hydrolyze lactose from whey protein (Liu et al., 2019), and enhancing t-cell response (Baron, 2009) all in vitro.

[0082] Bacillus clausii has been proven efficacious in preventing recurrent respiratory infections (Marseglia et al., 2007), reducing duration and severity of diarrhoea (Sudha et al., 2019) in vivo. Bacillus clausii has also been proven capable to produce protein hydrolysates with antimicrobial and antioxidant capacity (Rochin-Medina et al., 2017), protect against acetaminophen induced acute liver injury (Neag et al., 2020), inhibit cytotoxic effects induced by Clostridium difficile and Bacillus cereus toxins (Ripert et al., 2016) in vitro.

[0083] Bacillus megaterium has been shown to exert protective effects against oxidative stress both in vitro and in vivo (Mazzoli et al., 2019). Bacillus megaterium has also been shown capable of adapting and surviving in acid stress conditions and chelating heavy metals in vitro (Ferreira et al., 2019).

[0084] In an embodiment, the probiotic bacteria employed in this invention are used in bacterial concentration of 10⁶-10¹³ CFU (colony forming units), for instance as a daily dose, including any amount or range that is included in said range. In an embodiment, the bacteria are employed in an amount of 10⁷-10¹² CFU, or 10⁸-10¹¹ CFU, or 10⁹-10¹⁰ CFU, or for instance in an amount of about 10⁶, about 10⁷, about 10⁸, about 10⁹, about 10¹⁰, about 10¹¹, about 10¹², and/or about 10¹³ CFU, and any amount or range including or between said amounts. In an embodiment, a composition of this invention comprises, consists essentially of, consists of, and/or is characterized by about 10⁶-about 10¹³ CFU such as about 10⁹ Bacillus clausii CSI08. In an embodiment, a composition of this invention comprises Bacillus clausii CSI08 (for instance about 10⁹ CFU) in combination with Bacillus megaterium MIT411 and/or Bacillus coagulans CGI314. In an embodiment, a composition of this invention is orally administered in capsule form. In an embodiment, Bacillus clausii CSI08 is in spore form, or is not in spore form.

[0085] In certain embodiments, compositions comprising Bacillus clausii CSI08 can include one or more dry carriers selected from the group consisting of trehalose, maltodextrin, rice flour, microcrystalline cellulose, stearate, magnesium inositol, fructooligosaccharide, galactooligosaccharide, dextrose, dried dairy products, and the like. In certain embodiments, the dry carrier can be added to the compositions comprising Bacillus clausii CSI08 in a weight percentage of from about 1% to about 95% by weight of the composition.

[0086] In certain embodiments, the compositions comprising Bacillus clausii CSI08 can include one or more liquid or gel-based carriers, selected from the group consisting of water and physiological salt solutions, urea, alcohols and derivatives thereof (e.g., methanol, ethanol, propanol, butanol), glycols (e.g., ethylene glycol, propylene glycol), and the like; natural or synthetic flavorings and food-quality coloring agents, all compatible with the organism; thickening agents selected from the group consisting of corn starch, guar gum, xanthan gum, and the like; one or more spore germination inhibitors selected from the group consisting of hyper-saline carriers, methylparaben, guargum, polysorbate, preservatives, and the like. In certain embodiments, the one or more liquid or gel-based carrier(s) can be added to the compositions comprising Bacillus clausii CSI08 in a weight/volume percentage of from about 0.6% to about 95% weight/volume of the composition. In certain embodiments, the natural or synthetic flavoring(s) can be added to the compositions comprising Bacillus clausii CSI08 in a weight/volume percentage of from about 3.0% to about 10.0% weight/volume of the composition. In certain embodiments, the coloring agent(s) can be added to the compositions comprising Bacillus clausii CSI08 in a weight/volume percentage of from about 1.0% to about 10.0% weight/volume of the composition. In certain embodiments, the thickening agent(s) can be added to the compositions comprising Bacillus clausii CSI08 in a weight/volume percentage of about 2% weight/volume of the composition. In certain embodiments, the one or more spore germination inhibitors can be added to the compositions comprising Bacillus clausii CSI08 in a weight/volume percentage of about 1% weight/volume of the composition.

### Delivery System

[0087] Suitable dosage forms include tablets, capsules, solutions, suspensions, powders, gums, and confectionaries. Sublingual delivery systems include, but are not limited to, dissolvable tabs under and on the tongue, liquid drops, and beverages. Edible films, hydrophilic polymers, oral dissolvable films, or oral dissolvable strips can be used. Other useful delivery systems comprise oral or nasal sprays or inhalers, and the like. Suitable dosage forms include tablets, capsules, solutions, suspensions, powders, gums, and confectionaries. Sublingual delivery systems include, but are not limited to, dissolvable tabs under and on the tongue, liquid drops, and beverages. Edible films, hydrophilic polymers, oral dissolvable films, or oral dissolvable strips can be used. Other useful delivery systems comprise oral or nasal sprays or inhalers, and the like.

[0088] For oral administration, probiotics may be further combined with one or more solid inactive ingredients for the preparation of tablets, capsules, pills, powders, granules, or other suitable dosage forms. For example, the active agent may be combined with at least one excipient selected from the group consisting of fillers, binders, humectants, disintegrating agents, solution retarders, absorption accelerators, wetting agents, absorbents, and lubricating agents. Other useful excipients include, but are not limited to, magnesium stearate, calcium stearate, mannitol, xylitol, sweeteners, starch, carboxymethylcellulose, microcrystalline cellulose, silica, gelatin, silicon dioxide, and the like

[0089] In certain embodiments, the components of compositions administered according to the methods of the present disclosure, together with one or more conventional adjuvants, carriers, or diluents, may thus be placed into the form of pharmaceutical compositions and unit dosages thereof. Such forms include: solids, and in particular, tablets, filled capsules, powder and pellet forms; liquids, and in particular, aqueous or non-aqueous solutions, suspensions, emulsions, elixirs; and capsules filled with the same; all for oral use, suppositories for rectal administration, and sterile injectable solutions for parenteral use. Such pharmaceutical compositions and unit dosage forms thereof may comprise conventional ingredients in conventional proportions, with or without additional active compounds or principles, and such unit dosage forms may contain any suitable effective amount of the active ingredient commensurate with the intended daily dosage range to be employed.

[0090] The components of the compositions administered according to the methods of the present disclosure can be administered in a wide variety of oral and parenteral dosage forms. It will be obvious to those skilled in the art that the following dosage forms may comprise, in certain embodiments, as the active component, either a chemical compound of the present disclosure or a pharmaceutically acceptable salt of a chemical compound of the present disclosure.

[0091] For preparing pharmaceutical compositions to be administered according to the methods of the present disclosure, pharmaceutically acceptable carriers can be either solid or liquid. Solid form preparations include powders, tablets, pills, capsules, cachets, suppositories, and dispersible granules. A solid carrier can be one or more substances that may also act as diluents, flavoring agents, solubilizers, lubricants, suspending agents, binders, preservatives, tablet disintegrating agents, or encapsulating materials.

[0092] In powders, the carrier is a finely divided solid, which is in a mixture with the finely divided active component. In tablets, the active component is mixed with the carrier having the necessary binding capacity in suitable proportions and compacted in the shape and size desired.

[0093] In certain embodiments, powders and tablets administered according to methods of the present disclosure preferably may contain from five or ten to about seventy percent of the active compound. Suitable carriers are magnesium carbonate, magnesium stearate, talc, sugar, lactose, pectin, dextrin, starch, gelatin, tragacanth, methylcellulose, sodium carboxymethylcellulose, a low melting wax, cocoa butter, and the like. The term “preparation” is intended to include the formulation of the active compound with encapsulating material as carrier providing a capsule in which the active component, with or without additional carriers, is surrounded by a carrier, which is thus in association with it. Similarly, cachets and lozenges are included. Tablets, powders, capsules, pills, cachets, and lozenges are included. Tablets, powders, capsules, pills, cachets, and lozenges can be used as solid forms suitable for oral administration.

[0094] Liquid preparations include, but are not limited to, solutions, suspensions, and emulsions, for example, water or water-propylene glycol solutions. For example, parenteral injection liquid preparations can be formulated as solutions in aqueous polyethylene glycol solution. In certain embodiments, chemical compounds administered according to methods of the present disclosure may thus be formulated for parenteral administration (e.g., by injection, for example, bolus injection or continuous infusion) and may be presented in unit dose for administration in ampoules, pre-filled syringes, small-volume infusion, or in multi-dose containers with an added preservative. The compositions may take such forms as suspensions, solutions, or emulsions in oily or aqueous vehicles, and may contain formulation agents such as suspending, stabilizing, and/or dispersing agents. Alternatively, the active ingredient may be in powder form, obtained by aseptic isolation of sterile solid or by lyophilization from solution, for constitution with a suitable vehicle, e.g., sterile, pyrogen-free water, before use.

[0095] Aqueous solutions suitable for oral use can be prepared by dissolving the active component in water and adding suitable colorants, flavors, stabilizing and thickening agents, as desired. Aqueous suspensions suitable for oral use can be made by dispersing the finely divided active component in water with viscous material, such as natural or synthetic gums, resins, methylcellulose, sodium carboxymethylcellulose, or other well-known suspending agents.

[0096] Compositions suitable for topical administration in the mouth include, but are not limited to: lozenges comprising the active agent in a flavored base, usually sucrose and acacia or tragacanth; pastilles comprising the active ingredient in an inert base such as gelatin and glycerine or sucrose and acacia; and mouthwashes comprising the active ingredient in suitable liquid carrier.

[0097] Solutions or suspensions are applied directly to the nasal cavity by conventional means, for example, with a dropper, pipette, or spray. The compositions may be provided in single or multi-dose form. In compositions intended for administration to the respiratory tract, including intranasal compositions, the compound will generally have a small particle size, for example, of the order of 5 microns or less. Such a particle size may be obtained by means known in the art, for example, by micronization.

[0098] The pharmaceutical preparations are preferably in unit dosage forms. In such form, the preparation is subdivided into unit doses containing appropriate quantities of the active component. The unit dosage form can be a packaged preparation, the package containing discrete quantities of preparation, such as packaged tablets, capsules, and powders in vials or ampoules. Also, the unit dosage form can be a capsule, tablet, cachet, or lozenge itself; or it can be the appropriate number of any of these in packaged form.

[0099] Tablets, capsules, and lozenges for oral administration and liquids for oral use are preferred compositions. Solutions or suspensions for application to the nasal cavity or to the respiratory tract are preferred compositions. Transdermal patches for topical administration to the epidermis are preferred.

[0100] Further details on techniques for formulation and administration may be found in the latest edition of REMINGTON'S PHARMACEUTICAL SCIENCES (Mack Publishing Co., Easton, PA).

[0101] In certain embodiments, compositions of the present invention including compositions administered according to the methods of the present disclosure may also include one or more excipients, most preferably one or more nutraceutical or pharmaceutical excipients. Compositions containing one or more excipients and incorporating one or more probiotics can be prepared by procedures known in the art. Optionally, compositions can include one or more adjuvants, excipients, carriers, buffers, diluents, and/or other customary pharmaceutical auxiliaries. For example, probiotics can be formulated into tablets, capsules, powders, suspensions, solutions for oral administration, solutions for parenteral administration including intravenous, intradermal, intramuscular, and subcutaneous administration, and solutions for application onto patches for transdermal application with common and conventional barriers, binders, diluents, and excipients.

[0102] In certain embodiments, nutraceutical compositions including nutraceutical compositions administered according to the methods of the present disclosure may include and may be administered in combination with a pharmaceutically acceptable carrier. In certain embodiments, the active ingredients in such formulations may comprise from about 1% by weight to about 99% by weight. In other embodiments, the active ingredients in such formulations may comprise from about 0.1% by weight to about 99.9% by weight. “Pharmaceutically acceptable carrier” means any carrier, diluent, or excipient that is compatible with the other ingredients of the formulation and not deleterious to the user. Useful excipients include, but are not limited to, microcrystalline cellulose, magnesium stearate, calcium stearate, any acceptable sugar (e.g., mannitol, xylitol), and the like, and for cosmetic use, a water or an oil base may be used, or mixture thereof including such as an emulsion.

### Routes of Administration

[0103] The strain Bacillus clausii CSI08 or a composition comprising a strain of the present invention may be administered by any route, including, but not limited to, oral, sublingual, buccal, ocular, pulmonary, rectal, vaginal, urethral, ureteral, and parenteral administration, or as an oral or nasal spray (e.g., inhalation of nebulized vapors, droplets, or solid particles). Parenteral administration includes, for example, intravenous, intramuscular, intraarterial, intraperitoneal, intranasal, intravaginal, intravesical (e.g., to the bladder), intradermal, transdermal, topical, or subcutaneous administration. Also contemplated within the scope of the invention is the instillation of a pharmaceutical composition in the body of the patient in a controlled formulation, with systemic or local release of the drug to occur at a later time. For example, the drug may be localized in a depot for controlled release to the circulation, or for release to a local site.

[0104] Pharmaceutical compositions of the invention may be those suitable for, and formulated for, any of the routes identified above, including for instance oral, rectal, bronchial, nasal, pulmonal, topical (including buccal and sub-lingual), transdermal, vaginal, urethral, ureteral, or parenteral (including cutaneous, subcutaneous, intramuscular, intraperitoneal, intravenous, intraarterial, intracerebral, intraocular injection, or infusion) administration, or those in a form suitable for administration by inhalation or insufflation, including powders and liquid aerosol administration, or by sustained release systems. Suitable examples of sustained release systems include semipermeable matrices of solid hydrophobic polymers containing the compound of the invention, which matrices may be in the form of shaped articles, e.g., films or microcapsules.

[0105] The embodiments described above may be further understood in connection with the following Examples. In addition, the following non-limiting examples are provided to illustrate the invention. However, the person skilled in the art will appreciate that it may be necessary to vary the procedures for any given embodiment of the invention, e.g., vary the order or steps.

### EXAMPLES

### Example 1

### Characterisation of Bacillus clausii Strain CSI08

### Temperature Stability:

[0106] Bacillus clausii CSI08 spores in PBS (pH 7.72) are stable at 45° C., and 75° C. from 30 seconds to 3 minutes, with some reduction in spore counts after treatment at 90° C. for 3 minutes.

[0107] FIG. 4 shows the stability of MuniSpore in PBS during a pasteurization process. Data represent the mean±SEM. Spore counts compared to 0 min. *P<0.0001.

[0108] Bacillus clausii CSI08 spores are stable in a pasteurization process and during other manufacturing methodologies used in food & beverage.

[0109] The strain shows bile stability and the strain shows acid stability. The survivability of B. clausii CSI08 spores was determined in acidic and bile salt conditions in nutrient broth media for 24 hours. Total spore count for B. clausii CSI08 does not show a significant reduction in viability or concentration after contact with acidic conditions or bile salt concentrated nutrient broth for 3 hours. At the most extreme conditions, pH 1.2 and 0.45% bile salt concentration a significant decrease in counts was observed after 24 hours. Both pH and bile salts at these concentrations and exposures greatly exceed the conditions in the stomach and intestinal tract.

[0110] FIG. 5 shows pH Survivability of B. clausii CSI08 spores at 0-, 3-, and 24-hour timepoints.

[0111] FIG. 6 shows bile salt survivability of B. clausii CSI08 spores at 0-, 3-, and 24-hour timepoints.

[0112] B. clausii CSI08 spores are not sensitive to acid conditions above 1.2 for 24 h and are resistant to bile salts concentrations up to 0.30% for 24 h. Therefore, B. clausii CSI08 spores can survive in low pH food and beverages (e.g., fruit juices) and in the stomach and intestine conditions.

[0113] The strain shows heat tolerance. Bacillus clausii CSI08 spores in PBS (pH 7.72) are stable at 45° C., and 75° C. from 30 seconds to 3 minutes, with some reduction in spore counts after treatment at 90° C. for 3 min.

[0114] Bacillus clausii CSI08 spores are stable in a pasteurization process and during other manufacturing methodologies in food & beverage.

[0115] Survivability of B. clausii CSI08 spores during an in vitro simulated digestion process (gastric phase: 0.3% pepsin pH=3 for 2 h; small intestinal phase: 0.1% pancreatin, 0.3% bile salts pH 7.5 for 2 h) was investigated. No reduction in B. clausii CSI08 spores counts after exposure to simplified gastric and small intestinal conditions detected. There is a decrease in L. rhamnosus counts at the small intestinal phase.

[0116] Results show the ability of Bacillus clausii CSI08 spores to efficiently survive the transit through the upper digestive tract.

[0117] FIG. 7 shows survival of Bacillus clausii CSI08 spores and L. rhamnosus GG under gastric and small intestinal digestion conditions simulated in vitro. Data represent the mean±SEM. Survival compared to 0 h *P<0.0001.

[0118] The strain produces a natural antibiotic substance in the form of bacteriocins.

[0119] The vegetative form B. clausii CSI08 is active against the common intestinal pathogens E. coli and Salmonella having potential to protect and restore gut microbial communities.

[0120] The vegetative form B. clausii CSI08 has also proven to have antimicrobial activity against the well-known skin and urinary tract pathogen Pseudomonas aeruginosa in liquid media.

TABLE 4
Antimicrobial activity

| | Inhibition capacity | | |
|---|---|---|---|
| Conditions | E. coli | S. enteritidis | P. aeruginosa |
| Solid media | + | + | − |
| Liquid media | + | + | + |

[0121] Table 4. Bacillus clausii CSI08 spores show antimicrobial activity against common pathogens. Antimicrobial activity detected (+), no antimicrobial activity observed (−).

[0122] The vegetative form B. clausii CSI08 revealed antimicrobial activity against E. coli, Salmonella, S. aureus and Pseudomonas aeruginosa in liquid medium.

[0123] FIGS. 8 and 9 show antimicrobial activity of Munispore (B. clausii CSI08) in liquid culture. Values represent average concentration lof₁₀ CFU/ml±standard deviation. *p<0.05, ****p<0.0001.

[0124] Therefore, the vegetative form B. clausii CSI08 has the potential to crowd out bacterial pathogens and maintain a healthy gut and skin microbiome.

[0125] Antioxidant activity: The total antioxidant activity of the vegetative form B. clausii CSI08 was compared with L. rhamnosus GG (DI_AS_030).

[0126] Munispore has higher amount of antioxidant activity than L. rhamnosus GG.

[0127] FIG. 10 shows total antioxidant capacity of B. clausii CSI08 and L. rhamnosus GG. Results show average concentration of Trolox equivalents in nmole/g (n=3)±standard error.

[0128] The increased levels of Trolox equivalent concentration in Bacillus clausii CSI08 spores can neutralize the effects of reactive oxidative species. The antioxidant properties in Bacillus clausii CSI08 spores enables the strain to act as producer of antioxidant enzymes and molecules that results in alleviation of oxidative damage.

[0129] Therefore, Bacillus clausii CSI08 spores are a potential probiotic with strong antioxidant properties

[0130] The antioxidant activity of the vegetative form B. clausii CSI08 was confirmed using a cell culture model and an in vivo C. elegans model of oxidative stress.

[0131] The vegetative form B. clausii CSI08 attenuates hydrogen peroxide-induced reduction in cell viability of epithelial cells (HT-29 cell line).

[0132] The vegetative form B. clausii CSI08 attenuates hydrogen peroxide-induced decrease in survival rate of C. elegans N2 after oxidative stress.

[0133] FIG. 11 shows the cytoprotective effect of the vegetative form B. clausii CSI08 on H₂O₂-exposed epithelium. Values are the means±SEM.*−P<0.0001 vs H₂O₂

[0134] FIG. 12 shows the survival rate of C. elegans N2 fed with 10⁸ and 10⁹ CFU/ml B. clausii CSI08, followed by oxidative stress caused by H₂O₂. NGM-control-fed nematodes; Vit C-positive control. Values are the average of two independent experiments (n=100/condition). *p<0.05 vs NGM (+H₂O₂).

[0135] Bacillus clausii CSI08 spores demonstrate a reversal of oxidative stress in mammalian cell lines and a host organism.

[0136] Adhesion ability and cytotoxic effect: the vegetative form B. clausii CSI08 doesn't influence the viability of the intestinal epithelial cells (HT-29 model).

[0137] The vegetative form and spores of B. clausii CSI08 have the significant ability to adhere to the mucous-producing cell line HT-29-MTX.

[0138] Adhesion of the vegetative form and spores of B. clausii CSI08 to the non-mucous producing intestinal epithelial cell line (HT-29) is negligible, graph not shown.

[0139] FIG. 13 shows the effect of vegetative cells B. clausii CSI08 on HT-29 cell viability. B. clausii CSI08 compared with untreated cells (medium). Values are means±SEM.

[0140] FIG. 14 shows adhesion of vegetative cells and spores B. clausii CSI08 to the HT-29-MTX. B. clausii CSI08 compared with L. fermentum. Values are means±SEM

[0141] Bacillus clausii CSI08 does not negatively impact mammalian cell viability and can adhere to the gut lining.

[0142] Anti-inflammatory activity: the vegetative form of B. clausii CSI08 and its cell-free supernatants ability to attenuate LPS-triggered pro-inflammatory response was investigated in an in vitro model of intestinal epithelium (HT-29 cell line).

[0143] Pre-treatment with the vegetative form of B. clausii CSI08, but not its supernatants (CFS), result in strong suppression of the expression of genes connected to pro-inflammatory response after exposure HT-29 cells to LPS.

[0144] FIGS. 15A and 15B show the modulation of LPS-induced pro-inflammatory response by B. clausii CSI08 in HT-29 cell line. Also shown the pattern of gene expression after co-incubation of HT-29 cells with B. clausii CSI08 and its CFS in unstimulated conditions (LPS-). $ p<0.05 vs LPS, #p<0.001 vs LPS, *p<0.0001 vs. LPS.

[0145] The vegetative form of B. clausii CSI08, but not its cell free supernatants, can reduce pro-inflammatory response in HT-29 cells triggered by LPS.

[0146] B. clausii CSI08 partially retains the ability to suppress pro-inflammatory response triggered by LPS in HT-29 cells after heat-inactivation.

[0147] FIG. 16 shows modulation of LPS-induced IL8 gene expression by viable and heat-killed B. clausii CSI08. *p<0.0001.

[0148] B. clausii CSI08 can down regulate LPS-induced NF-κB activation in HT-29 cell line exposed to LPS.

[0149] FIG. 17 shows NF-κB levels in the nuclear fractions of control HT-29s, cells exposed to LPS, and cells treated with B. clausii CSI08 prior to adding LPS. LPS versus LPS+B. clausii*p<0.001 according to t-test.

[0150] B. clausii CSI08's immunomodulatory efficacy is mediated in part via Nf-κB pathway.

[0151] The vegetative form B. clausii CSI08 and its cell-free supernatants ability to attenuate PolyI·C-triggered pro-inflammatory response (a viral mimetic) was investigated in an in vitro model of intestinal epithelium (HT-29 cell line).

[0152] Pre-treatment with CSI08 and its supernatants (CFS) result in substantial suppression of the expression of genes connected to pro-inflammatory response after exposure HT-29 cells to PolyI·C.

[0153] FIGS. 18A and 18B show modulation of PolyI·C-triggered pro-inflammatory response by B. clausii CSI08 in HT-29 cell line. qPCR analysis of IL-8, TNF-α, IL-17C, and CXCL10 gene expression 4 h after exposure to PolyI·C in HT-29 cells preincubated with B. clausii CSI08 or its cell free supernatants (CFS). $ p<0.05, & p<0.01; #p<0.001, *p<0.0001.

[0154] The vegetative form of B. clausii CSI08, and its cell free supernatants, can reduce pro-inflammatory response in HT-29 cells triggered by PolyI·C, a viral mimetic.

[0155] Immune effect: B. clausii CSI08 can provoke the strong immune response in U937-derived macrophages

[0156] The effect of the vegetative form B. clausii CSI08 on the innate immune system was investigated using the cell model of U937-derived macrophages.

[0157] The vegetative form of B. clausii CSI08 stimulated a robust immune response, resulted in secretion of high levels of pro-inflammatory (TNF-α, IL-1β, IL-18), regulatory (G-CSF, GM-CSF, IL-6) and anti-inflammatory (IL-10, IL-IRA, EGF) cytokines by macrophages.

[0158] FIG. 19 shows immunostimulatory effect of CSI08. Cytokine levels in cell culture supernatants of U937-derived macrophages challenged by vegetative cells B. clausii CSI08 or LPS for 5 h. Values are the means±SEM. *p<0.05, & p<0.01, % p<0.001; $ p<0.0001 LPS or CSI08 vs NC (negative control). ++p<0.05; +p<0.0001 CSI08 vs LPS.

[0159] B. clausii CS108 prolongs the lifespan of C. elegans N2 worms compared with control condition-NGM medium. This effect is DAF-16-dependent.

[0160] FIG. 20 shows the lifespan of C. elegans wild type N2 strain in control conditions (NGM) and lifespan of C. elegans wild type N2 fed with B. clausii CSI08. The average of two independent assays (n=100/replicate/condition).

[0161] Transcription factor DAF-16 (orthologue of the FOXO) mediates the effect of B. clausii CSI08 on C. elegans lifespan.

[0162] The data indicates the role of B. clausii CSI08 as a potential anti-inflammatory effector or immune activator.

[0163] FIG. 21 shows the lifespan of C. elegans daf-16 mutant worms in control conditions (NGM) and lifespan of C. elegans daf-16 mutants fed with B. clausii CSI08. The average of two independent assays (n=100/replicate/condition).

[0164] B. clausii CSI08 demonstrates strong immunoprotective effects in a host organism.

[0165] B. clausii CSI08 exhibits moderate caseolytic/protease activity.

[0166] B. clausii CSI08 was weakly positive for casein degradation/Cascolytic activity on skim milk agar plates.

[0167] Quantitative analysis of B. clausii CSI08's caseolytic activity was evaluated using a commercial kit employing fluorescently tagged casein derivatives.

[0168] B. clausii CSI08 displays moderate protease activity (L. rhamnosus as a negative control).

[0169] FIG. 22 shows B. clausii CSI08 is slightly caseolytic using streak method. The figure shows B. megaterium and B. clausii CSI08 caseolytic activity.

[0170] FIG. 23 shows proteolytic activity determined by EnzCheck® kit assay. Data represent the mean±SEM.

[0171] B. clausii CSI08 exhibits moderate caseolytic/protease activity

[0172] B. clausii CSI08's diverse carbohydrate assimilation profile: B. clausii CSI08 was positive for 20 carbohydrates out of 49 tested, using commercial API 50 CH strip.

[0173] The majority of these carbohydrates were simple sugars such as D-Ribose, D-Glucose, D-Fructose, D-Mannose, and Disaccharides such as Trehalose, Sucrose and Cellobiose etc. Additionally, there were compounds belonging to cyanogenic glycoside (amygdalin), amine sugars (Glucosamine) and coumarin glucoside (Aesculin) that B. clausii CSI08 can metabolise. B. clausii CSI08 can also metabolise polysaccharide Glycogen and shows a weak ability to metabolise Amidon (Starch).

TABLE 5
Carbohydrates fermented by B. clausii CSI08

| | B. | | B. |
|---|---|---|---|
| | clausii | | clausii |
| Carbohydrate | CSI08 | Carbohydrate | CSI08 |
| GLYCEROL | + | N-ACETYLGLUCOSAMINE | + |
| 1-ARABINOSE | + | AMYGDALIN | (+) |
| D-RIBOSE | + | ESCULIN FERRIC CITRATE | + |
| D-GLUCOSE | + | D-CELLOBIOSE | + |
| D-FRUCTOSE | + | D-SACCHAROSE | + |
| D-MANNOSE | + | D-TREHALOSE | + |
| L-RHAMNOSE | + | D-RAFINOSE | (+) |
| DULCITOL | + | AMIDON | (+) |
| D-MANNITOL | + | GLYCOGEN | (+) |
| D-SORBITOL | + | D-TAGATOSE | + |

[0174] Table 5: List of Carbohydrates that are effectively fermented using API 50 Ch strips.

[0175] These data suggest that B. clausii CSI08 could help digest these compounds in the gut.

[0176] B. clausii CSI08 is Esteroloytic and has Phosphatase and β-Galactosidase Enzymes: B. clausii CSI08 was positive for esterase, phosphohydrolase, and β-galactosidase activity using API ZYM kit which implies that.
[0177] B. clausii CSI08 may generate free fatty acids from the action of esterase in the presence of an appropriate lipid source.
[0178] Beta-galactosidase-enzyme that catalyzes lactose hydrolysis into glucose and galactose and, importantly, is responsible for formation of galacto-oligosaccharides (GOS) promoting the growth of Bifidobacterium and Lactobacillus species
[0179] Phosphohydrolase catalyzes the hydrolysis of phosphates
[0180] No detrimental enzymes activity detected (β-glucuronidase, α-chymotrypsin and β-glucosaminidase).

TABLE 6
Enzymatic profile of B. clausii CSI08

| | | B. clausii |
|---|---|---|
| | | CSI08 |
| Esterase activity | Esterase (C4:0) | + |
| | Esterase (C8:0) | + |
| Lipase activity | Lipase (C14:0) | − |
| Peptidase activity | Leucine ary lamidase | − |
| | Valine ary lamidase | − |
| | Cystine ary lamidase | − |
| Proteinase activity | Trypsin | − |
| | α-chymotrypsin | − |
| Phosphatase activity | Acid phosphatase | − |
| | Alkaline phosphatase | − |
| | Phosphohydrolyase | + |
| Glycosidase activity | α-Galactosidase | − |
| | β-Galactosidase | + |
| | β-Glucuronidase | − |
| | α-Glucosidase | − |
| | β-Glucosidase | − |
| | β-Glucosaminidase | − |
| | α-Mannosidase | − |
| | α-Fucosidase | − |

Table 6: Enzymatic Profile of B. clausii CSI08 Using API ZYM Kit

[0181] This indicates the potential ability of B. clausii CSI08 to break down lactose and fats. These data suggest that B. clausii CSI08 could help digest these molecules in the gut.

Proteomic Analysis of B. clausii CSI08 Identifies Proteins with Potential Probiotic Benefits:

[0182] Extracellular secretions of B. clausii CSI08 grown in TSB broth for 24 h were sent to mass spectrometry to identify proteins released by the probiotic strain. A total of 29 proteins were detected of which 5 had potential probiotic benefits.

TABLE 7
Proteomic Analysis of B. clausii CSI08

| Proteins of interest | Potential roles |
|---|---|
| Chaperonin GroEL | Involved in protein folding and |
| | preservation |
| 2,3-butanediol | Involved in metabolism of branched |
| dehydrogenase | amino-acids - flavor properties. |
| Alpha-glucosidase/alpha- | Involved in digestion of carbohydrates |
| galactosidase | |
| Trypsin-like peptidase | Involved in digestion of proteins |
| domain-containing protein | |
| C40 family peptidase | Involved in digestion of proteins |

[0183] These data confirms previous in vitro results showing how B. clausii CSI08 can help in digestion of proteins and carbohydrates and can contribute to the production of branched amino-acids.

[0184] B. clausii CSI08 can produce essential amino acids and group B vitamins: The ability of B. clausii CSI08 to synthesize essential amino acids and vitamins during cultivation in liquid medium (TSB) was assessed. The results suggest the production of several amino acids (alanine, glutamine and glutamic acid, histidine, methionine, proline, tyrosine, and threonine) and two group B vitamins (Pantothenic acid/B5 and Cyanocobalamin/B12) by B. clausii CSI08.

[0185] FIG. 24 shows concentrations of essential amino acids and vitamins in overnight cultures of B. clausii CSI08 determined by RP-HPLC-FLD and RP-HPLC-MS correspondingly. Values are means±SEM. *p<0.05, & p<0.01, $ p<0.0001.

[0186] B. clausii CSI08 can produce essential amino acids and group B vitamins

### Example 2

### Assess Adhesion Ability to an In Vitro Model of Intestinal Epithelium

[0187] Cell lines: Human Colorectal Adenocarcinoma Cell Line HT-29 and mucous-secreting cell line HT-29-MTX were propagated using low glucose DMEM medium supplemented with 10% Fetal Bovine Serum, 2 mM glutamine, 100 U/ml penicillin, 100 μg/ml streptomycin, and 2 μg/ml amphotericin B in a 5% CO₂ atmosphere at 37° C.

[0188] Cells were seeded onto 24-well plates at a density 5×10⁵ cell/well and cultured for 21-28 days to complete maturation. Media was replaced every 2-3 days.

[0189] Prior to experiments cells were washed twice with 0.5 ml DPBS. DPBS was completely aspirated from the wells after the second round of washing.

[0190] Preparation of spores: Ten milligrams of B. clausii CSI08, B. megaterium MIT411 and B. coagulans CGI314 spores powders were weighted in 15 ml falcon tubes and resuspended in 10 ml of full culture medium without antibiotics. Suspensions were aliquoted and stored at −20° C. until use. Suspensions were used within 2 weeks upon preparation.

[0191] Adhesion assay: 500 μl of spores suspensions (1.3×10⁷-9.2×10⁷ CFU/ml) were added to HT-29 and HT-29-MTX cells, mixed by a gentle swirl, and incubated for 2.5 h at 37° C. in the CO₂ incubator. Control wells not containing mammalian cells were prepared and incubated in parallel in the same way (0.5 ml of spores' suspensions).

[0192] Upon incubation HT-29 and HT-29-MTX cells were washed 4 times with 0.5 ml PBS. After that 50 μl of Trypsin/EDTA solution and 50 μl of PBS were added to the wells and incubated for 10 min with gentle shaking (˜100 rpm) at 37° C. Fifty microliters of Trypsin/EDTA solution were added to control wells.

[0193] Consequently, 450 μl of PBS were added to the wells with spores, contents of the wells were transferred into Eppendorf tubes with scrapping and subjected to three rounds of vigorous shaking 30 sec each. Contents of control wells were transferred into Eppendorf tubes and subjected to one round of shaking.

[0194] Serial dilutions (plus dilutions of control wells) were prepared in PBS and plated onto BC agar (B. coagulans CGI314) or PetriFilm™ (B. clausii CSI08, B. megaterium MIT411). Plates were incubated at 37° C. for 48 h prior to counting, PetriFilm were incubated at 37° C. for 24 h prior to counting.

[0195] Experiments were performed two or three times with three technical replicates per experiment. The results are expressed as means±SEM.

TABLE 8
Adherence of B. clausii CSI08, B. megaterium MIT411 and
B. coagulans CGI314 spores to the HT-29-MTX cell line

| Percentage of | | | |
|---|---|---|---|
| adherence to HT- | B. clausii | B. megaterium | B. coagulans |
| 29-MTX cell line | CSI08 | MIT411 | CGI314 |
| Mean | 12.10 | 20.68 | 19.68 |
| Standard error of | 0.7710 | 3.005 | 2.197 |
| the mean | | | |

TABLE 9
Adherence of B. clausii CSI08, B. megaterium MIT411
and B. coagulans CGI314 spores to the HT-29 cell line

| Percentage of | | | |
|---|---|---|---|
| adherence to HT- | B. clausii | B. megaterium | B. coagulans |
| 29 cell line | CSI08 | MIT411 | CGI314 |
| Mean | 0.2578 | 1.499 | 0.8033 |
| Standard error of | 0.02035 | 0.2983 | 0.1781 |
| the mean | | | |

### Conclusion:

[0196] 1. Results set out above demonstrate higher ability of spores to adhere to the mucous-secreting cell line HT-29-MTX compared to non-mucus secreting cells, possibly due to spores' physical properties.
[0197] 2. B. megaterium MIT411 and B. coagulans CGI314 spores have higher (but overall low) ability to adhere to non-mucus producing cell line HT-29 compared to B. clausii CSI08 spores.

### Example 3

### Evaluation of Bacillus clausii CSI08, Bacillus megaterium MIT411 and a Bacillus Cocktail on Safety, Tolerance and Gastrointestinal Health: A Randomised, Double-Blind, Placebo-Controlled Trial in Healthy Adults

[0198] The safety, tolerance and impact of 1×10⁹ CFU Bacillus clausii CSI08, 1×10⁹ CFU Bacillus megaterium MIT411 and a probiotic cocktail containing 0.5×10⁹ CFU of Bacillus subtillis DE111®, 0.5×10⁹ CFU of Bacillus megaterium MIT411, 0.5×10⁹ CFU Bacillus coagulant CGI314, 0.5×10⁹ CFU Bacillus clausii CSI08 (i.e., Bacillus subtilis DE111®, Bacillus megaterium MIT411, Bacillus coagulans CGI314, and Bacillus clausii CSI08 with a total count of 2.0×10⁹ CFU) administered daily were assessed as compared with a maltodextrin containing placebo control. A total of 98 study participants received daily doses for 45 days, followed by a washout period of 2 weeks. A questionnaire to capture the incidence and duration of upper respiratory tract, urinary tract and/or gastrointestinal complaints and a diary to capture stool regularity and consistency was kept daily to record compliance throughout the 45 days. Faecal and blood samples were collected for microbiological and haematological analysis at the start and end of the treatment period. The probiotic cocktail significantly decreased the incidence of loose stools throughout the entire study. The recorded respiratory, urinary and gastrointestinal symptoms, defecation frequency and other stool consistency were not influenced. No clinically relevant changes in blood parameters such as liver and kidney function and no serious adverse events appeared during and after administration. There were no changes in symptoms including sadness, irritability, energy, appetite, tension, stress, sleep, cardiovascular events, aches and pains, and dizziness as determined by a mood questionnaire administered to participants at baseline and at the end of the treatment period. Similarly, the measured inflammatory cytokines, antioxidant levels, cholesterol, triglycerides, free amino acids or minerals remained unaffected. There were no negative changes in alpha or beta diversity of the microbiota with any of the treatment groups. These promising data suggest that these treatments were safe and well tolerated, and further work with larger cohorts are justified to determine the efficacy of these potential probiotics in select demographic groups.

[0199] Probiotics are live microorganisms residing in the human gut with low or no pathogenicity and exhibit beneficial effects for the host. Common products containing probiotic bacteria include dietary supplements and foodstuffs such as fermented dairy products, sauerkraut, and salami. Probiotic supplementation has shown positive results for relief of various ailments such as: antibiotic associated diarrhea, constipation, allergies, and diabetes. Probiotics have also exhibited protective properties.

[0200] Probiotic supplements can contain one or more different bacterial strains that exert different effects on the human gut. Common probiotic strains are lactic acid producers such as Lactobacillus, Bifidobacterium, and Streptococcus due to their resistance to gastric acids, bile salts, and pancreatic enzymes. Studies have shown that lactic acid bacteria are effective inhibitors of pathogenic, gram-negative, bacterial colonization (e.g. Salmonella typhimurium, Clostridium difficile, and Escherichia coli) in vitro.

[0201] Not all probiotic supplements are lactic acid producers however. Bacillus subtilis spores have been used as probiotics, competitive exclusion agents, and prophylactics for human and animal consumption. All four Bacilli strains are gram-positive, spore forming, rod-shaped bacterium. Under nutrient limiting conditions, Bacillus sp. can form resistant dormant endospores to environmental stressors and nutrient deprivation, making these bacteria a viable option for a probiotic supplement.

[0202] DE111, CSI08, CGI314, and MIT411 are unique strain of probiotics. Being Bacillus strains of probiotics, they are able to resist the harsh digestive environment and colonise the gut, thus supporting a healthy GI tract. To date, DE111 is sold in both the USA and Canada as a probiotic food ingredient and as a probiotic capsule for adults. The other three Bacillus probiotics CSI08, CGI314, and MIT411 used in this trial are not currently on the market and are claimed herein.

[0203] This trial was to determine the safety of 3 new probiotic strains and to assess their efficacy in reducing the incidence and/or duration of gastrointestinal problems and infections as well as respiratory infections in healthy adults.

### Materials and Methods

### Subjects

[0204] Healthy adult volunteers, 18-65 years of age, were recruited using flyers, posters and from their physicians from February to July 2021. Inclusion criteria included: willingness to provide informed consent and being in good overall health. Exclusion criteria included: existence of any pre-existing adverse event conditions (e.g. gastric ulcer, Crohn's disease, UC, diabetes, kidney disease, HIV/AIDS, hepatitis, cancer, and organ transplant recipient), taking medications for digestive complaints (constipation, bloating or diarrhoea), antibiotic usage within the past four weeks prior to randomisation, unwillingness to discontinue any probiotic supplement other than that provided by the study, known immunodeficiency or use of immunosuppressive medication, pregnancy, 6 month post-partum or breastfeeding, women of childbearing age planning on pregnancy during the course of the study, participation in another study and use of medication for mood (e.g. antidepressants, anxiolytics, antipsychotics).

[0205] This study was approved by the University of Ljubljana, Biotechnical Faculty, Nutritional Research Ethics Committee in Slovenia and conducted according to guidelines established by the Declaration of Helsinki. All participants were informed of the aims, requirements and risks of the study in addition to being notified that they could withdraw from the study at any time. Participants provided their written consent indicating their full knowledge of the study protocol.

### Experimental Design

[0206] This study was a double-blinded, placebo-controlled, randomized, parallel trial. The study took place through University Clinical Centre Maribor, Slovenia and was co-ordinated by the CRO Vizera d.o.o., Slovenia. Participants were randomised to either one of three treatment groups or placebo administered daily. Treatment groups were 1×10⁹ CFU/dose of Bacillus clausii CSI08, 1×10⁹ CFU/dose of Bacillus megaterium MIT411, and a probiotic cocktail containing Bacillus subtilis DE111®, Bacillus megaterium MIT411, Bacillus coagulans CGI314, and Bacillus clausii CSI08 with a total count of 2.0×10⁹ CFU/dose administered daily. Placebo was rice maltodextrin.

[0207] A randomisation scheme was performed by CRO Vizera d.o.o., Slovenia with the allocation sequence being concealed from study personnel and participants until randomisation day in sealed, opaque envelopes. After assessment of baseline characteristics (age, sex, height, weight by digital scale) and collection of an initial stool sample, an envelope was unscaled and participants were assigned to an intervention. Investigators received individually closed envelopes containing the link between the randomization number and the treatment group for a specific participant. The sealed envelopes could only be opened in case of emergency. The Sponsor was immediately notified if a participant's treatment was unblinded during the course of the study. Information regarding the un-blinding had to be recorded in the data source document and in the Case Report Form (CRF) of the participant. Participants were then instructed to consume one capsule per day at the end of a meal.

[0208] Participants visited the study centre 3 times, and performed 2 calls with the designated Investigator: Visit 0 for screening purposes (Screening Visit), 2 times during treatment period with Visit 1 being baseline visit, where randomization and distribution of product were performed, and Visit 2 being the End of Treatment Visit. Additionally, the patients performed a phone call with Investigator after 21 days of product consumption (In between visits call) and after 2 weeks of follow up following Visit 2 (Follow-up call). A graphical flow chart of the study is presented in FIG. 25.

[0209] After screening, consent and randomization, participants provided blood and stool samples prior to any treatment. At the end of the 45 day intervention period, study participants provided a second stool sample and again provided blood samples.

[0210] FIG. 25 shows a graphical flow chart of the study design.

### Probiotic Administration Protocol

[0211] Deerland Probiotics and Enzymes (Kennesaw, Georgia, US) provided investigational products as identical, oblong 300 mg capsules and placebo was indistinguishable by appearance. The study capsules were provided in bottles labelled with a treatment code by a study collaborator who did not have contact with study personnel or participants.

### Study Protocol

[0212] Participants completed the questionnaire daily to monitor time of defecation and type of stool samples based on the Bristol stool chart index and if there were any symptoms including: gastrointestinal distress, respiratory distress, urinary tract symptoms, cephalic, car-nose-throat, behavioural, emetic, loss of appetite, fever and epidermal. If any visits to their GP or any medication was prescribed during the trial this was also captured and reported. A mood questionnaire was administered to participants at baseline and at the end of the treatment period to assess their experience over the previous month. This questionnaire consisted of 14 captured symptoms including sadness, irritability, energy, appetite, tension, stress, sleep, cardiovascular events, aches and pains and dizziness on a scale of 1 (no noticeable symptoms) to 3 (severe). Any adverse events were reported to study staff.

### Blood Samples Collection and Preparation

[0213] For safety bloods, a 3-mL red cap serum clot activator tube was used (Greiner Bio-One, 454029) for blood collection. For biochemistry blood panel high- and low-density lipoproteins, total cholesterol and triglyceride determination, 3.5 mL SST II Advanced/gel yellow cap vials (Greiner Bio-One, 454029) were used. For antioxidants and cytokine determination, whole blood was collected into 4-mL lithium-heparin containing tubes (Greiner Bio-One, 454029). Plasma samples were prepared by centrifugation at 2000 G for 15 min. The supernatant was aliquoted and stored at −80° C. for later analysis.

### LDL, HDL, Total Cholesterol and Triglyceride Determination

[0214] Hematology and Biochemistry assessment were run in University Clinical Centre Maribor, Slovenia. Safety bloods were run with a Sysmex EN-1000, while Biochemical assays for LDL, HDL, total cholesterol and triglyceride were assayed according to manufacturer's instructions and analysed with an Abbott Allinity C.

### Cytokine Quantification

[0215] The concentrations of IL-8 and TNF-alpha in serum samples were determined by sandwich ELISAs: Human IL-8 (CXCL8) ELISA Kit (ELH-IL8-1, RayBiotech) and Human TNF alpha ELISA Kit (ELH-TNFa-1, RayBiotech) according to the manufacturer's instruction. Prior to ELISAs serum samples were diluted 1:2 using dilution buffers supplied with the kits.

### Antioxidant Activity Determination

[0216] Total antioxidant activity was assessed using the total antioxidant capacity assay kit (Sigma, Ireland) according to manufacturer's instructions and the absorbance was measured at 340 nm.

### Stool Collection

[0217] Stools were collected at the baseline visit prior to treatment and again at the final visit on day 45 using Zymokit DNA/RNA Shield™ Fecal Collection Tube (ZymoResearch, California, US). Participants were instructed to place the collection systems containing the samples on ice immediately after defecation and to deliver samples to study personnel on clinic visits. DNA extraction and 16S rRNA sequencing

[0218] Total fecal DNA from approximately 200 mg sample was extracted using ZymoBIOMICS DNA Miniprep Kit (Zymo Research, Irvine, CA, USA) in accordance with manufacturer's instructions. Briefly, the stool samples were placed in the ZR BashingBead™ Lysis tubes containing 750 μl ZymoBIOMICS™ Lysis Solution and processed in a BeadBug™ 6 homogenizer (Benchmark Scientific, China): 5×1 min beating at 4350 rpm with 1 min intermittent step between beating cycles. After that, the lysis tubes were centrifuged at 10,000 g for 1 minute. Four hundred microliters of supernatants were transferred to the Zymo-Spin™ III-F Filters in collection tubes and further centrifuged at 8,000 g for 1 minute. The filtrates were mixed with 1,200 μl of ZymoBIOMICS™ DNA Binding Buffer, transferred to Zymo-Spin™ IICR Columns in Collection Tubes and centrifuged at 10,000 g for 1 minute. After three rounds of washing, DNA was eluted in 100 μl of ZymoBIOMICS™ DNase/RNase Free water and further purified using Zymo-Spin™ III-HRC Filters according to the protocol. DNA concentration was determined using Qubit dsDNA BR Assay kit (ThermoFisher Scientific).

### Data Generation

[0219] Library preparation was performed following the Illumina guidelines for 16S Metagenomic Sequencing Library Preparation (https://support.illumina.com/documents/documentation/chemistry_documentation/16s/16s-metagenomic-library-prep-guide-15044223-b.pdf). Briefly, 16S degenerated primers are used to amplify the target from each sample. At the same time Illumina adapters and barcodes are included to allow the creation of the library. Sequencing was performed on a Novaseq 6000 machine producing paired-end 250 bp reads. A quality control of the sequencing data was performed with the software QIIME2. On average, 670 thousand read pairs were produced per sample. Taxonomic classification of the ASVs (also referred to as OTUs) was performed using QIIME2/DADA2 and the Silva132 database.

### Statistical Analyses

[0220] 25 participants per arm was determined to be sufficient to assess the occurrence and nature of possible adverse events including incidence and duration of urinary tract, gastrointestinal, and upper respiratory complaints. Descriptive statistics was used to evaluate these outcomes in this study. Kruskal-Wallis test was used to confirm there was no statistically significant difference in the occurrence of any of these individual symptoms among the four treatment groups at the beginning of the study, or in the incidence and duration of gastrointestinal, upper respiratory or urinary tract complaints over the duration of the study. Furthermore, nonparametric Mann-Whitney U test with Holm's correction was used for pairwise comparison between each of the three probiotic product groups compared to placebo group.

[0221] For the gastrointestinal health questionnaire and blood analyses the difference in individual symptoms score change from baseline to the end of the treatment period was compared among the treatment groups using the Analysis of variance (one-way ANOVA test) with post hoc test evaluating pairwise comparison between each of the three treatment groups as compared to placebo group.

[0222] For sequencing data, multiple alpha diversity indices were calculated including Observed, Chao1, ACE, Shannon and Simpson index. The alpha diversity was then compared among the experimental groups and against the Placebo in order to detect differences due to the treatments- or within treatments from baseline to the post-treatment timepoint.

[0223] With the aim of quantifying compositional dissimilarity between different samples, the Bray-Curtis dissimilarity index was calculated and used for the creation of multiple clustering plots. This method collapses information from multiple dimensions for ease of visualisation and interpretation. A paired Wilcoxon test was used to compare the distribution of the groups.

[0224] Differential abundance analyses were carried out to detect significant differences in genera abundance across the different treatments and time points. Day 1 samples from all treatments were compared against the Day 1 Placebo group to determine if there were any resting difference at baseline. For each group, the pairwise comparison Day 45 vs Day 1 was performed. Bifactorial analyses was also performed using the Placebo group as reference to detect if there is a significant difference in the response of the treatments at Day 45 with respect to Day 1 compared to the response of the Placebo group at Day 45 with respect to Day 1.

### Results

### Participants

[0225] Ninety eight participants completed the 45 day intervention (FIG. 25). After screening, one participant declined to participate, and another was withdrawn as they became pregnant. A total of 12 adverse events were reported in the study. These included gastroesophageal reflux (3 AEs), rash (2 AEs), and vertigo (2 AEs). One case of rash was reported as a fungal rash (Tinea corporis) and one case of vertigo was attributed to the use of approved co-medication. All other reported AEs occurred only once, namely: vaginal inflammation, stool parasite (possibly related to a trip overseas), right wrist spin, metallic taste, lower back pain, inflammation of sebaceous gland, granuloma, dark brown coloured stool, and acne.

[0226] Causality assessment revealed no relation between the reported AEs and the study products.

[0227] No serious adverse events were reported throughout the study.

### Participant Demographics:

TABLE 10
Participant demographics for the study

| | | | | | | | Probiotic | |
|---|---|---|---|---|---|---|---|---|
| | Placebo | | B. clausii | | B. megaterium | | cocktail | |
| | N = 24 | | N = 24 | | N = 25 | | N = 25 | |
| Male (%) | 7 | (29.2) | 9 | (37.5) | 7 | (28) | 7 | (28) |
| Female (%) | 17 | (70.8) | 15 | (62.5) | 18 | (72) | 18 | (72) |
| Mean Age (SD) | 40.5 | (12.3) | 37.3 | (12.7) | 40.6 | (9.6) | 35 | (11.6) |
| Age (min-max) | 22-63 | | 19-65 | | 23-58 | | 18-60 | |
| Mean Height (SD) | 172 | (0.1) | 172 | (0.1) | 172 | (0.08) | 171 | (0.09) |
| Height (min-max) | 152-189 | | 158-192 | | 160-186 | | 155-190 | |
| Mean Weight (SD) | 73.9 | (16.2) | 70.7 | (16.1) | 78.1 | (15.8) | 70.2 | (14.7) |

| | | | | |
|---|---|---|---|---|
| Weight (min-max) | 52-112 | 48-106 | 45-120 | 50-101.5 |

### Gastrointestinal Health Status at Screening Visit:

TABLE 11
Gastrointestinal health at baseline (N = 98). (How often
have you had the following problems during last month?)

| | | | | | | | Probiotic | |
|---|---|---|---|---|---|---|---|---|
| | Placebo | | B. clausii | | B. megaterium | | cocktail | |
| | (N* = 24) | | (N* = 24) | | (N* = 25) | | (N* = 25) | |
| Diarrhea (p = 0.499) | 24 | | 24 | | 25 | | 25 | |
| No problems or <1/month (%) | 22 | (91.7) | 24 | (100.0) | 23 | (92.0) | 24 | (96.0) |
| Monthly basis (%) | 2 | (8.3) | 0 | (0.0) | 2 | (8.0) | 1 | (4.0) |
| Weekly basis (%) | 0 | (0.0) | 0 | (0.0) | 0 | (0.0) | 0 | (0.0) |
| Daily basis (%) | 0 | (0.0) | 0 | (0.0) | 0 | (0.0) | 0 | (0.0) |
| Loose stool (p = 0.771) | 24 | | 24 | | 25 | | 25 | |
| No problems or <1/month (%) | 12 | (50.0) | 16 | (66.7) | 16 | (64.0) | 15 | (60.0) |
| Monthly basis (%) | 10 | (41.7) | 6 | (25.0) | 7 | (28.0) | 8 | (32.0) |
| Weekly basis (%) | 1 | (4.2) | 1 | (4.2) | 1 | (4.0) | 0 | (0.0) |
| Daily basis (%) | 1 | (4.2) | 1 | (4.2) | 1 | (4.0) | 2 | (8.0) |
| Constipation (p = 0.625) | 24 | | 24 | | 25 | | 25 | |
| No problems or <1/month (%) | 16 | (66.7) | 18 | (75.0) | 20 | (80.0) | 20 | (80.0) |
| Monthly basis (%) | 6 | (25.0) | 4 | (16.7) | 4 | (16.0) | 3 | (12.0) |
| Weekly basis (%) | 0 | (0.0) | 1 | (4.2) | 1 | (4.0) | 2 | (8.0) |
| Daily basis (%) | 2 | (8.3) | 1 | (4.2) | 0 | (0.0) | 0 | (0.0) |
| Bowel sounds/stomach | 24 | | 24 | | 25 | | 25 | |
| rumble (p = 0.745) | | | | | | | | |
| No problems or <1/month (%) | 13 | (54.2) | 16 | (66.7) | 17 | (68.0) | 18 | (72.0) |
| Monthly basis (%) | 8 | (33.3) | 5 | (20.8) | 5 | (20.0) | 3 | (12.0) |
| Weekly basis (%) | 3 | (12.5) | 2 | (8.3) | 3 | (12.0) | 4 | (16.0) |
| Daily basis (%) | 0 | (0.0) | 1 | (4.2) | 0 | (0.0) | 0 | (0.0) |
| Cramping/stomach pain (p = 0.880) | 24 | | 24 | | 25 | | 25 | |
| No problems or <1/month (%) | 18 | (75.0) | 17 | (70.8) | 21 | (84.0) | 18 | (72.0) |
| Monthly basis (%) | 4 | (16.7) | 6 | (25.0) | 2 | (8.0) | 6 | (24.0) |
| Weekly basis (%) | 2 | (8.3) | 0 | (0.0) | 2 | (8.0) | 1 | (4.0) |
| Daily basis (%) | 0 | (0.0) | 1 | (4.2) | 0 | (0.0) | 0 | (0.0) |
| Flatulence (p = 0.153) | 24 | | 24 | | 25 | | 25 | |
| No problems or <1/month (%) | 12 | (50.0) | 9 | (37.5) | 7 | (28.0) | 16 | (64.0) |
| Monthly basis (%) | 6 | (25.0) | 9 | (37.5) | 10 | (40.0) | 5 | (20.0) |
| Weekly basis (%) | 4 | (16.7) | 5 | (20.8) | 3 | (12.0) | 3 | (12.0) |
| Daily basis (%) | 2 | (8.3) | 1 | (4.2) | 5 | (20.0) | 1 | (4.0) |
| Bloating (p = 0.136) | 24 | | 24 | | 25 | | 25 | |
| No problems or <1/month (%) | 12 | (50.0) | 14 | (58.3) | 9 | (36.0) | 15 | (60.0) |
| Monthly basis (%) | 8 | (33.3) | 7 | (29.2) | 9 | (36.0) | 8 | (32.0) |
| Weekly basis (%) | 3 | (12.5) | 3 | (12.5) | 4 | (16.0) | 2 | (8.0) |
| Daily basis (%) | 1 | (4.2) | 0 | (0.0) | 3 | (12.0) | 0 | (0.0) |
| Blood in stool (p = 0.393) | 24 | | 24 | | 25 | | 25 | |
| No (%) | 23 | (95.8) | 23 | (95.8) | 24 | (96.0) | 22 | (88.0) |
| Rarely (%) | 0 | (0.0) | 1 | (4.0) | 2 | (8.0) | 0 | (0.0) |
| Occasionally (%) | 1 | (4.2) | 0 | (0.0) | 0 | (0.0) | 1 | (4.2) |
| Often (%) | 0 | (0.0) | 0 | (0.0) | 1 | (4.0) | 0 | (0.0) |

N* = number of participants included in the ITT population,
*p-value for Kruskal-Wallis test

[0228] There were no significant differences between the groups for any of individual readouts.

### Stool Consistency and Regularity

[0229] Mean bowel movement frequency (regularity) ranged from 0.33 to 2.16 stools/day in the study participants. A variety of period and intervention group comparisons were concluded not equivalent. Bowel movement frequencies were not significantly different when comparing means to placebo treatment group or washout period (Table 12).

TABLE 12
Treatment had no effect on stool regularity over the
duration of the 45 day trial as compared with placebo

| | | | |
|---|---|---|---|
| | | | Probiotic |
| Placebo | B. clausii | B. megaterium | cocktail |
| (N = 24) | (N = 24) | (N = 25) | (N = 25) |

Stools per day (p = 0.834)*

| | | | | |
|---|---|---|---|---|
| mean (SD): | 1.21 (0.41): | 1.2 (0.39): | 1.1 (0.3): | 1.19 (0.45): |
| min-max | 0.36-2.04 | 0.52-2.13 | 0.51-2.04 | 0.33-2.16 |

*p-value for ANOVA test

[0230] Stool consistency is reported as the proportion of participants with loose stool and the proportion of participants with hard stool in the total treatment period. Baseline questionnaire reported no differences in the incidence of loose stool or hard stools/constipation in the study groups as compared to control (Table 2). Participants were asked to report over the last month how often they had loose stools or hard stools/constipation. The scale was as follows 0=never, 1=monthly, 2=weekly, 3=daily.

[0231] FIG. 26 shows the probiotic cocktail significantly decreased the incidence of loose stool over the course of the study as compared to placebo control.

[0232] Over the course of the first 6 weeks of the study, the probiotic cocktail significantly decreased the incidence of loose stools as an overall effect when compared with control (FIG. 26), as determined by repeated measures one way ANOVA (treatment: F (2.615, 13.08)=20.07, P<0.0001; time (F_{(5, 15)}=2.803, p=0.055). Of the study participants, 16 of the 25 in the probiotic group reported no loose stools at all over the course of the study, while there were only 8 in the placebo group, 10 in the B. clausii group, and 10 in the B. megaterium group.

[0233] FIG. 27 shows no effect of any treatments on percentage of hard stools as compared to placebo control.

[0234] There was no significant effect of any of the treatment groups on the percentage of hard stools over the course of the study (FIG. 27) (F (1.829, 9.146)=2.831, P=0.113; time (F_{(5, 15)}=1.121, p=0.391).

### Incidence and Duration of Gastrointestinal Tract Symptoms

TABLE 13
Number of days with symptoms of gastrointestinal distress
reported in Participant diary over the course of the study

| | | | | | B. | | Probiotic | |
|---|---|---|---|---|---|---|---|---|
| | Placebo | | B. clausii | | megaterium | | cocktail | |
| | (N* = 24) | | (N* = 24) | | (N* = 25) | | (N* = 25) | |
| Loss of appetite | 24 | | 24 | | 25 | | 25 | |
| (p* = 0.233) | | | | | | | | |
| mean (SD): min-max | 0.1 (0.3): | 0-1 | 0.2 (1.0): | 0-5 | 0.0 (NC): | 0-0 | 0.0 (NC): | 0-0 |
| p-value vs placebo | / | | 0.589 | | 0.434 | | 0.434 | |
| Diarrhea (p* = 0.888) | 24 | | 24 | | 25 | | 25 | |
| mean (SD): min-max | 0.1 (0.3): | 0-1 | 0.4 (1.3): | 0-6 | 0.1 (0.3): | 0-1 | 0.2 (0.6): | 0-3 |
| p-value vs placebo | / | | 1.000 | | 1.000 | | 1.000 | |
| Constipation (p* = 0.722) | 24 | | 24 | | 25 | | 25 | |
| mean (SD): min-max | 0.5 (2.4): | 0-12 | 0.3 (1.4): | 0-7 | 0.3 (1.4): | 0-7 | 0.6 (2.2): | 0-8 |
| p-value vs placebo | / | | 0.976 | | 1.000 | | 1.000 | |
| Vomiting (p* = 0.713) | 24 | | 24 | | 25 | | 25 | |
| mean (SD): min-max | 0.1 (0.3): | 0-1 | 0.0 (NC): | 0-0 | 0.0 (0.2): | 0-1 | 0.0 (0.2): | 0-1 |
| p-value vs placebo | / | | 0.611 | | 1.000 | | 1.000 | |
| Gases (p* = 0.468) | 24 | | 24 | | 25 | | 25 | |
| mean (SD): min-max | 0.6 (1.5): | 0-6 | 0.4 (1.1): | 0-5 | 0.9 (1.7): | 0-6 | 0.2 (0.6): | 0-2 |
| p-value vs placebo | / | | 0.639 | | 1.000 | | 1.000 | |
| Bowel sounds (p* = 0.809) | 24 | | 24 | | 25 | | 25 | |
| mean (SD): min-max | 0.2 (0.6): | 0-2 | 0.4 (1.6): | 0-8 | 0.1 (0.3): | 0-1 | 0.2 (0.7): | 0-3 |
| p-value vs placebo | / | | 1.000 | | 1.000 | | 1.000 | |
| Cramping/stomach pain | 24 | | 24 | | 25 | | 25 | |
| (p* = 0.391) | | | | | | | | |
| mean (SD): min-max | 0.5 (1.2): | 0-5 | 0.5 (1.3): | 0-5 | 0.3 (0.6): | 0-2 | 0.1 (0.3): | 0-1 |
| p-value vs placebo | / | | 0.987 | | 1.000 | | 1.000 | |
| Bloating (p* = 0.543) | 24 | | 24 | | 25 | | 25 | |
| mean (SD): min-max | 1.5 (5.1): | 0-25 | 0.3 (1.1): | 0-5 | 0.3 (0.7): | 0-2 | 0.7 (2.1): | 0-8 |

| | | | | |
|---|---|---|---|---|
| p-value vs placebo | / | 0.558 | 1.000 | 0.963 |

N* = number of participants included in the ITT population, NC = not calculable, p* = p-value for Kruskal-Wallis test, p = p- value for Mann-Whitney U test.

[0235] Kruskal-Wallis test did not show significant differences in the number of days with gastrointestinal infection symptoms among treatment groups. Compared to placebo, none of the study products containing probiotics showed a statistically significant difference in the number of days with gastrointestinal distress symptoms.

### Incidence and Duration of Urinary Tract Symptoms

TABLE 14
Number of days with symptoms of urinary tract complaints reported in Participant diary

| | | | | | | | Probiotic | |
|---|---|---|---|---|---|---|---|---|
| | Placebo | | B. clausii | | B. megaterium | | cocktail | |
| | (N* = 24) | | (N* = 24) | | (N* = 25) | | (N* = 25) | |
| Pain burning when | 24 | | 24 | | 25 | | 25 | |
| urinating (p* = 0.257) | | | | | | | | |
| mean (SD): min-max | 0.2 (0.8): | 0-4 | 0.0 (NC): | 0-0 | 0.0 (NC): | 0-0 | 0.0 (NC): | 0-0 |
| p-value vs placebo | / | | 0.635 | | 1.000 | | 1.000 | |
| Higher frequency | 24 | | 24 | | 25 | | 25 | |
| urinating (p* = 0.744) | | | | | | | | |
| mean (SD): min-max | 0.0 (NC): | 0-0 | 0.0 (NC): | 0-0 | 0.2 (0.8): | 0-4 | 0.1 (0.4): | 0-2 |
| p-value vs placebo | / | | 1.000 | | 0.982 | | 0.982 | |
| Cramping pressure lower | 24 | | 24 | | 25 | | 25 | |
| abdomen or back (p* = 0.254) | | | | | | | | |
| mean (SD): min-max | 0.0 (NC): | 0-0 | 0.0 (NC): | 0-0 | 0.2 (0.8): | 0-3 | 0.1 (0.4): | 0-2 |

| | | | | |
|---|---|---|---|---|
| p-value vs placebo | / | 1.000 | 0.646 | 0.982 |

N* = number of participants included in the ITT population, NC = not calculable, p* = p-value for Kruskal-Wallis test, p = p- value for Mann-Whitney U test.

[0236] Kruskal-Wallis test did not show any significant differences in the number of days with urinary tract infection symptoms among treatment groups. Compared to placebo, none of the study products containing probiotics showed a statistically significant difference in the number of days with urinary infection symptoms.

### Incidence and Duration of Upper Respiratory Tract Infection

TABLE 15
Number of days with symptoms of respiratory tract complaints reported in Participant diary

| | Placebo | | B. clausii | | B. megaterium | | Probiotic | |
|---|---|---|---|---|---|---|---|---|
| | (N* = 24) | | (N* = 24) | | (N* = 25) | | cocktail (N* = 25) | |
| Fever (p* = 0.935) | 24 | | 24 | | 25 | | 25 | |
| mean (SD): min-max | 0.2 (0.8): | 0-4 | 0.3 (1.3): | 0-6 | 0.2 (0.7): | 0-3 | 0.3 (1.4): | 0-7 |
| p-value vs placebo | / | | 1.000 | | 0.966 | | 1.000 | |
| Headache (p* = 0.898) | 24 | | 24 | | 25 | | 25 | |
| mean (SD): min-max | 1.0 (2.0): | 0-7 | 0.9 (1.7): | 0-6 | 0.6 (1.0): | 0-4 | 0.4 (1.0): | 0-4 |
| p-value vs placebo | / | | 1.000 | | 0.860 | | 1.000 | |
| Stuffed nose (p* = 0.909) | 24 | | 24 | | 25 | | 25 | |
| mean (SD): min-max | 0.3 (1.0): | 0-4 | 0.3 (1.1): | 0-5 | 0.6 (2.2): | 0-10 | 0.4 (2.0): | 0-10 |
| p-value vs placebo | / | | 1.000 | | 0.689 | | 1.000 | |
| Runny nose (p* = 0.530) | 24 | | 24 | | 25 | | 25 | |
| mean (SD): min-max | 0.5 (1.6): | 0-6 | 0.4 (1.2): | 0-5 | 0.8 (2.1): | 0-10 | 0.4 (2.0): | 0-10 |
| p-value vs placebo | / | | 0.957 | | 1.000 | | 1.000 | |
| Sore throat (p* = 0.142) | 24 | | 24 | | 25 | | 25 | |
| mean (SD): min-max | 0.5 (1.1): | 0-4 | 0.2 (0.8): | 0-4 | 0.4 (0.9): | 0-3 | 0.6 (2.1): | 0-10 |
| p-value vs placebo | / | | 0.539 | | 0.870 | | 1.000 | |
| Dry cough (p* = 0.868) | 24 | | 24 | | 25 | | 25 | |
| mean (SD): min-max | 0.6 (1.9): | 0-8 | 0.1 (0.3): | 0-1 | 0.4 (2.0): | 0-10 | 0.1 (0.6): | 0-3 |
| p-value vs placebo | / | | 1.000 | | 0.607 | | 1.000 | |
| Productive cough (p* = 0.395) | 24 | | 24 | | 25 | | 25 | |
| mean (SD): min-max | 0.1 (0.4): | 0-2 | 0.0 (NC): | 0-0 | 0.4 (2.0): | 0-10 | 0.4 (1.6): | 0-8 |
| p-value vs placebo | / | | 0.459 | | 1.000 | | 0.983 | |
| Sore ear (p* = 0.417) | 24 | | 24 | | 25 | | 25 | |
| Mean (SD): min-max | 0.0 (NC): | 0-0 | 0.0 (NC): | 0-0 | 0.0 (NC): | 0-0 | 0.0 (0.2): | 0-1 |

| | | | | |
|---|---|---|---|---|
| p-value vs placebo | / | 1.000 | 1.000 | 1.000 |

N* = number of participants included in the ITT population, NC = not calculable, p* = p-value for Kruskal-Wallis test, p = p- value for Mann-Whitney U test.

[0237] Kruskal-Wallis test did not show any significant differences in the number of days with respiratory tract infection symptoms among treatment groups. Compared to placebo, none of the study products containing probiotics showed a statistically significant difference in the number of days with symptoms.

### Daily Questionnaire Analysis

[0238] Table 16 summarizes the answers to the Mood questionnaire at baseline and at the end of the study for the 3 treatment groups and the placebo. Mean changes with 95% confidence interval are shown. Results of the ANOVA omnibus test (p*-value) and one-sample T test (p-value) are also presented. Test of normality for the change in scores of the Gut-brain axis show that the data do not follow normal distribution, which could affect the results with borderline significance (p-values between 0.05 and 0.10). This affects two items: Loss of energy and Changes in appetite. An alternative nonparametric Kruskal Wallis test was applied to these items; p-values of 0.111 (Loss of energy) and 0.123 (Changes in appetite) were observed. In general, mean values of the scores were less intense (participants were less bothered by these symptoms) at the end of the treatment period including the placebo group. Consequently, One-sample T-test results show that in one third of tests (of 70 performed) a statistically significant change Gut-brain axis questionnaire score was observed. However, this can be observed for all treatment groups including the placebo group. Consequently, the results of the ANOVA test show, that no significant differences in Gut-brain axis score change among the treatment groups were detected, however a borderline significance for the items Loss of energy and Changes in appetite was observed. The participants in the Bacillus megaterium group experienced the largest change for these two items. Nevertheless, no statistically significant difference for pairwise comparison of probiotic groups with placebo was observed (Table 16 (below)).

TABLE 16
Gut-brain axis questionnaire answers at baseline (N = 98) and at the end of the study
(Post). (How much did the following emotion or feeling bother you in the last 30 days, including
today?)

| Placebo | | B. clausii | | B. megaterium | | Probiotic cocktail | |
|---|---|---|---|---|---|---|---|
| (N* = 24) | | (N* = 24) | | (N* = 25) | | (N* = 25) | |
| Baseline | Post | Baseline | Post | Baseline | Post | Baseline | Post |

Sadness (p* = 0.264)

| | | | | | | | | |
|---|---|---|---|---|---|---|---|---|
| sum of scores | 12 | 11 | 22 | 13 | 16 | 12 | 16 | 4 |
| No. of participants | 9 | 9 | 14 | 11 | 11 | 8 | 11 | 4 |
| affected | | | | | | | | |

Irritation (p* = 0.341)

| | | | | | | | | |
|---|---|---|---|---|---|---|---|---|
| sum of scores | 21 | 14 | 28 | 20 | 25 | 16 | 28 | 12 |
| No. of participants | 16 | 10 | 19 | 14 | 20 | 12 | 21 | 10 |
| affected | | | | | | | | |

Loss of energy (p* = 0.076)

| | | | | | | | | |
|---|---|---|---|---|---|---|---|---|
| sum of scores | 29 | 18 | 28 | 22 | 37 | 14 | 30 | 18 |
| No. of participants | 19 | 14 | 17 | 15 | 21 | 10 | 20 | 11 |
| affected | | | | | | | | |

Changes in appetite (p* = 0.065)

| | | | | | | | | |
|---|---|---|---|---|---|---|---|---|
| sum of scores | 8 | 7 | 12 | 12 | 19 | 6 | 7 | 5 |
| No. of participants | 6 | 6 | 9 | 10 | 13 | 4 | 5 | 4 |
| affected | | | | | | | | |

Hard to breathe/choking (p* = 0.129)

| | | | | | | | | |
|---|---|---|---|---|---|---|---|---|
| sum of scores | 4 | 4 | 5 | 3 | 7 | 0 | 5 | 1 |
| No. of participants | 4 | 3 | 3 | 3 | 5 | 0 | 5 | 1 |
| affected | | | | | | | | |

Heart pounding/racing (p* = 0.744)

| | | | | | | | | |
|---|---|---|---|---|---|---|---|---|
| sum of scores | 7 | 5 | 6 | 4 | 8 | 2 | 3 | 3 |
| No. of participants | 6 | 3 | 4 | 3 | 5 | 2 | 3 | 3 |
| affected | | | | | | | | |

Sleeping problems (p* = 0.915)

| | | | | | | | | |
|---|---|---|---|---|---|---|---|---|
| sum of scores | 18 | 14 | 30 | 16 | 21 | 12 | 19 | 11 |
| No. of participants | 12 | 10 | 15 | 11 | 15 | 10 | 14 | 8 |
| affected | | | | | | | | |

Concentration problems (p* = 0.915)

| | | | | | | | | |
|---|---|---|---|---|---|---|---|---|
| sum of scores | 18 | 8 | 28 | 15 | 20 | 8 | 16 | 5 |
| No. of participants | 14 | 8 | 18 | 13 | 15 | 6 | 9 | 3 |
| affected | | | | | | | | |

Nervousness/stress (p* = 0.937)

| | | | | | | | | |
|---|---|---|---|---|---|---|---|---|
| sum of scores | 27 | 17 | 27 | 18 | 24 | 13 | 32 | 18 |
| No. of participants | 18 | 13 | 17 | 13 | 17 | 11 | 20 | 15 |
| affected | | | | | | | | |

Angriness/tension (p* = 0.478)

| | | | | | | | | |
|---|---|---|---|---|---|---|---|---|
| sum of scores | 17 | 11 | 19 | 13 | 19 | 9 | 23 | 18 |
| No. of participants | 13 | 9 | 13 | 9 | 16 | 8 | 18 | 8 |
| affected | | | | | | | | |

Headaches (p* = 0.511)

| | | | | | | | | |
|---|---|---|---|---|---|---|---|---|
| sum of scores | 14 | 8 | 11 | 11 | 20 | 12 | 12 | 5 |
| No. of participants | 10 | 6 | 8 | 8 | 13 | 10 | 10 | 4 |
| affected | | | | | | | | |

Muscle aches/pains (p* = 0.391)

| | | | | | | | | |
|---|---|---|---|---|---|---|---|---|
| sum of scores | 13 | 6 | 9 | 8 | 12 | 5 | 11 | 7 |
| No. of participants | 11 | 5 | 8 | 7 | 8 | 4 | 7 | 4 |
| affected | | | | | | | | |

Stiffness (p* = 0.376)

| | | | | | | | | |
|---|---|---|---|---|---|---|---|---|
| sum of scores | 8 | 2 | 9 | 5 | 12 | 2 | 6 | 4 |
| No. of participants | 6 | 2 | 7 | 4 | 9 | 2 | 5 | 3 |
| affected | | | | | | | | |

Dizziness (p* = 0.732)

| | | | | | | | | |
|---|---|---|---|---|---|---|---|---|
| sum of scores | 5 | 5 | 4 | 2 | 5 | 1 | 1 | 1 |
| No. of participants | 4 | 3 | 3 | 2 | 4 | 1 | 1 | 1 |
| affected | | | | | | | | |

N* = number of participants included in the ITT population; scores: 0-not bothered, 1-mildly bothered, 2-somewhat bothered, and 3-very bothered.
*p-value for ANOVA (omnibus test).

### Cholesterol and Triglyceride Levels

[0239] Blood samples were gathered at the start of the study prior to any treatment and again at the end of the 45 day treatment period. There was no significant effect of treatment within groups, nor was there any significant effect of treatment as compared with baseline for high density lipoproteins, low density lipoproteins, total cholesterol and triglyceride concentrations (Table 17.

TABLE 17
Cholesterol and triglyceride levels at baseline,
and at the end of the study (N = 98)

| | | | |
|---|---|---|---|
| | Bacillus | Bacillus | Probiotic |
| Placebo | clausii | megaterium | cocktail |
| (N* = 24) | (N* = 24) | (N* = 25) | (N* = 25) |

HDL [mmol/L] (p = 0.749)

| | | | | |
|---|---|---|---|---|
| Baseline: mean (SD) | 1.4 (0.2): | 1.6 (0.3): | 1.5 (0.4): | 1.6 (0.4): |
| Post: mean (SD) | 1.4 (0.2) | 1.5 (0.3) | 1.4 (0.3) | 1.6 (0.4) |

LDL [mmol/L] (p = 0.894)

| | | | | |
|---|---|---|---|---|
| Baseline: mean (SD) | 3.3 (0.9): | 3.5 (0.8): | 3.7 (1.0): | 3.4 (0.7): |
| Post: mean (SD) | 3.3 (0.9) | 3.4 (0.8) | 3.7 (1.0) | 3.3 (0.7) |

TC [mmol/L] (p = 0.976)

| | | | | |
|---|---|---|---|---|
| Baseline: mean (SD) | 5.3 (1.2): | 5.6 (1.0): | 5.9 (1.5): | 5.5 (0.9): |
| Post: mean (SD) | 5.0 (1.1) | 5.4 (1.0) | 5.6 (1.2) | 5.3 (0.9) |

TG [mmol/L] (p = 0.548)

| | | | | |
|---|---|---|---|---|
| Baseline: mean (SD) | 1.0 (0.6): | 1.0 (0.4): | 1.8 (3.6): | 1.2 (1.2): |
| Post: mean (SD) | 1.2 (0.7) | 1.2 (0.8) | 1.7 (2.6) | 1.3 (1.2) |

N* = number of participants included in the ITT population, HDL = high-density lipoprotein, LDL = low-density lipoprotein, TC = total cholesterol, TG = triglycerides.
*p-value for ANOVA (omnibus test)

### Blood Cytokine Levels

TABLE 18
IL-8 and TNFα levels at baseline, and at the end of the study (N = 98)

| | | | |
|---|---|---|---|
| | Bacillus | Bacillus | Probiotic |
| Placebo | clausii | megaterium | cocktail |
| (N* = 24) | (N* = 24) | (N* = 25) | (N* = 25) |

IL-8 [pg/mL] (p = 0.887)

| | | | | |
|---|---|---|---|---|
| Baseline: mean (SD) | 99.65 (60.87): | 105.4 (59.02): | 100 (58.47): | 94.72 (71.38): |
| Post: mean (SD) | 94.17 (70.96) | 127 (89.38) | 120.3 (82.96) | 146.5 (107.6) |

TNFα [pg/mL] (p = 0.662)

| | | | | |
|---|---|---|---|---|
| Baseline: mean (SD) | 445.2 (322.6): | 490.7 (244.9): | 358.7 (180.4): | 549.3 (492.9): |
| Post: mean (SD) | 452.7 (345.3) | 525.9 (416.8) | 473.2 (331.4) | 573.1 (423) |

N* = number of participants included in the ITT population,
*p-value for ANOVA (omnibus test)

[0240] Blood samples were gathered at the start of the study prior to any treatment and again at the end of the 45 day treatment period. There was no significant effect of treatment within groups, nor was there any significant effect of treatment as compared with baseline for IL-8 or TNFα (Table 18).

### Blood Antioxidant Levels

TABLE 19
Antioxidant levels at baseline, and at the end of the study (N = 98)

| | | | |
|---|---|---|---|
| | Bacillus | Bacillus | Probiotic |
| Placebo | clausii | megaterium | cocktail |
| (N* = 24) | (N* = 24) | (N* = 25) | (N* = 25) |

Conc. Of Trolox Equivalent [nmole/mL] (p = 0.831)

| | | | | |
|---|---|---|---|---|
| Baseline: mean (SD) | 3898 (316.5): | 3941 (319.8): | 3855 (366.3): | 3943 (290): |
| Post: mean (SD) | 3919 (483.7) | 4007 (364.3) | 3983 (420.9) | 3916 (361.5) |

N* = number of participants included in the ITT population,
*p-value for ANOVA (omnibus test)

[0241] Blood samples were gathered at the start of the study prior to any treatment and again at the end of the 45 day treatment period. There was no significant effect of treatment within groups, nor was there any significant effect of treatment as compared with baseline for antioxidant levels (Table 10).

### Metabolite Levels

TABLE 20
Amino acid levels at baseline, and at the end of the study (N = 98)

| | | | |
|---|---|---|---|
| | Bacillus | Bacillus | Probiotic |
| Placebo | clausii | megaterium | cocktail |
| (N* = 24) | (N* = 24) | (N* = 25) | (N* = 25) |

Aspartate [mg/L] (*p = 0.3752)

| | | | | |
|---|---|---|---|---|
| Baseline: mean (SD) | 1.947 (0.6): | 1.427 (0.3): | 1.382 (0.3): | 2.183 (0.8): |
| Post: mean (SD) | 2.244 (1.1) | 1.526 (0.6) | 1.309 (0.5) | 2.569 (1.0) |

Serine [mg/L] (*p = 0.6652)

| | | | | |
|---|---|---|---|---|
| Baseline: mean (SD) | 16.891 (6.1): | 11.094 (2.7): | 15.203 (1.9): | 14.255 (4.1): |
| Post: mean (SD) | 16.406 (4.3) | 11.625 (3.5) | 15.718 (5.5) | 16.388 (4.5) |

Histidine [mg/L] (*p = 0.8230)

| | | | | |
|---|---|---|---|---|
| Baseline: mean (SD) | 57.285 (14.6): | 48.185 (8.7): | 64.944 (12.2): | 52.170 (11.1): |
| Post: mean (SD) | 59.280 (11.9) | 51.156 (11.2) | 71.494 (20.6) | 59.894 (12.7) |

Arginine [mg/L] (*p = 0.7104)

| | | | | |
|---|---|---|---|---|
| Baseline: mean (SD) | 28.951 (13.2): | 21.006 (7.3): | 25.925 (7.9): | 21.759 (8.8): |
| Post: mean (SD) | 26.675 (11.3) | 22.846 (8.8) | 24.431 (11.6) | 24.413 (11.1) |

Glutamine [mg/L] (*p = 0.8118)

| | | | | |
|---|---|---|---|---|
| Baseline: mean (SD) | 18.254 (7.2): | 10.970 (2.9): | 16.626 (6.6): | 15.973 (6.1): |
| Post: mean (SD) | 17.266 (6.0) | 9.747 (3.3) | 14.395 (6.7) | 16.925 (6.2) |

Glycine [mg/L] (*p = 0.8067)

| | | | | |
|---|---|---|---|---|
| Baseline: mean (SD) | 17.272 (5.0): | 12.164 (4.5): | 20.620 (4.9): | 14.508 (4.2): |
| Post: mean (SD) | 16.450 (4.1) | 11.660 (3.2) | 21.257 (8.0) | 15.903 (3.5) |

Threonine [mg/L] (*p = 0.8875)

| | | | | |
|---|---|---|---|---|
| Baseline: mean (SD) | 12.658 (4.5): | 9.641 (2.1): | 12.005 (2.6): | 11.847 (3.4): |
| Post: mean (SD) | 12.939 (4.1) | 9.574 (2.3) | 12.656 (5.2) | 13.365 (3.7) |

Alanine [mg/L] (*p = 0.5359)

| | | | | |
|---|---|---|---|---|
| Baseline: mean (SD) | 27.476 (7.9): | 19.316 (4.6): | 25.346 (6.1): | 23.329 (6.1): |
| Post: mean (SD) | 25.796 (7.3) | 20.151 (6.4) | 25.924 (9.5) | 26.976 (6.7) |

Proline [mg/L] (*p = 0.5683)

| | | | | |
|---|---|---|---|---|
| Baseline: mean (SD) | 19.101 (6.3): | 13.542 (3.8): | 19.477 (3.0): | 16.487 (4.7): |
| Post: mean (SD) | 19.581 (6.7) | 14.221 (3.6) | 20.163 (6.6) | 20.570 (5.8) |

Tyrosine [mg/L] (*p = 0.4548)

| | | | | |
|---|---|---|---|---|
| Baseline: mean (SD) | 10.617 (4.0): | 7.542 (2.2): | 11.594 (2.1): | 9.326 (3.5): |
| Post: mean (SD) | 10.337 (2.7) | 7.786 (2.0) | 11.759 (3.4) | 11.112 (3.0) |

Valine [mg/L] (*p = 0.8116)

| | | | | |
|---|---|---|---|---|
| Baseline: mean (SD) | 16.720 (4.2): | 12.976 (2.9): | 19.415 (3.1): | 16.746 (4.4): |
| Post: mean (SD) | 17.916 (5.0) | 13.512 (4.3) | 20.359 (4.7) | 19.411 (3.9) |

Methionine [mg/L] (*p = 0.5286)

| | | | | |
|---|---|---|---|---|
| Baseline: mean (SD) | 2.850 (1.0): | 2.117 (0.5): | 2.710 (0.4): | 2.546 (0.8): |
| Post: mean (SD) | 2.926 (0.9) | 2.280 (0.7) | 2.803 (0.9) | 3.037 (0.7) |

Lysine [mg/L] (*p = 0.3400)

| | | | | |
|---|---|---|---|---|
| Baseline: mean (SD) | 22.722 (6.5): | 17.765 (4.1): | 20.404 (4.5): | 22.181 (5.3): |
| Post: mean (SD) | 24.508 (6.5) | 18.470 (6.8) | 20.734 (6.6) | 27.171 (7.1) |

Isoleucine [mg/L] (*p = 0.9065)

| | | | | |
|---|---|---|---|---|
| Baseline: mean (SD) | 6.354 (2.0): | 4.684 (1.1): | 6.754 (1.1): | 6.236 (1.6): |
| Post: mean (SD) | 6.955 (2.2) | 5.149 (1.9) | 7.321 (1.8) | 7.412 (1.7) |

Leucine [mg/L] (*p = 0.6745)

| | | | | |
|---|---|---|---|---|
| Baseline: mean (SD) | 13.418 (5.2): | 9.122 (2.3): | 13.446 (2.0): | 12.612 (3.9): |
| Post: mean (SD) | 13.865 (4.7) | 9.694 (3.6) | 14.082 (3.6) | 15.162 (3.6) |

Phenylalanine [mg/L] (*p = 0.6375)

| | | | | |
|---|---|---|---|---|
| Baseline: mean (SD) | 8.701 (3.2): | 6.138 (1.3): | 9.376 (1.6): | 7.864 (2.1): |
| Post: mean (SD) | 8.586 (2.1) | 6.460 (1.7) | 9.870 (2.5) | 8.925 (2.1) |

N* = number of participants included in the ITT population,
*p-value for ANOVA (omnibus test)

[0242] Blood samples were gathered at the start of the study prior to any treatment and again at the end of the 45 day treatment period. There was no significant effect of treatment within groups, nor was there any significant effect of treatment as compared with baseline for the amino acids tested (Table 20).

TABLE 21
Mineral levels at baseline, and at the end of the study (N = 98)

| | | | |
|---|---|---|---|
| | Bacillus | Bacillus | Probiotic |
| Placebo | clausii | megaterium | cocktail |
| (N* = 24) | (N* = 24) | (N* = 25) | (N* = 25) |

Riboflavin [μg/L] (*p = 0.4222)

| | | | | |
|---|---|---|---|---|
| Baseline: mean (SD) | 452 (16): | 453 (12): | 455 (27): | 453 (13): |
| Post: mean (SD) | 451 (16) | 450 (9) | 450 (12) | 457 (17) |

Nicotinic acid B3 [μg/L] (*p = 0.6467)

| | | | | |
|---|---|---|---|---|
| Baseline: mean (SD) | 7 (0.33): | 7 (0.42): | 8 (0.45): | 7 (0.9): |
| Post: mean (SD) | 7 (0.34) | 7 (0.46) | 7 (0.45) | 7 (0.3) |

Pantoneic acid [μg/L] (*p = 0.8899)

| | | | | |
|---|---|---|---|---|
| Baseline: mean (SD) | 142 (5): | 144 (6): | 146 (4): | 140 (4): |
| Post: mean (SD) | 142 (5) | 143 (6) | 147 (5) | 141 (3) |

Folic acid [μg/L] (*p = 0.5073)

| | | | | |
|---|---|---|---|---|
| Baseline: mean (SD) | 300 (215): | 286 (112): | 377 (164): | 275 (139): |
| Post: mean (SD) | 311 (214) | 283 (112) | 385 (189) | 250 (106) |

N* = number of participants included in the ITT population,
*p-value for ANOVA (omnibus test)

[0243] Blood samples were gathered at the start of the study prior to any treatment and again at the end of the 45 day treatment period. There was no significant effect of treatment within groups, nor was there any significant effect of treatment as compared with baseline for mineral levels (Table 21).

### Microbiota Changes

[0244] Samples from subjects collected before and after the treatment period were selected for comprehensive microbiota analysis. After removal of short reads and low quality reads, 202,413 sequences were retained, with a mean of 2,736 sequences per sample and an average length of 440 nucleotides. Using the ESPRIT-tree, and after removal of OTUs containing less than 10 sequences, 1,077 and 1,618 OTUs at the 95 and 98% similarity level were retained.

[0245] FIG. 28 is a boxplot showing the Chao1 values distribution in each experimental group for Day 1 and Day 45. Dotted lines connect the paired samples. A paired Wilcoxon test was used to compare the distribution of the groups. A p-value less than 0.05 should be considered as statistically significant.

[0246] FIG. 29 is a boxplot showing the Chao1 values distribution in each experimental group for Day 1 and Day 45. A Wilcoxon test was used to compare the distribution of each experimental group against the Placebo. A p-value less than 0.05 should be considered as statistically significant.

[0247] FIG. 30 illustrates PCoA clustering performed on the Bray-Curtis dissimilarity matrix. Each treatment is separated in a different tab while colours and shape are associated with the time points. Samples from the two time points tend to cluster together for all the treatments, and the data are not significantly different from each other at day 1 baseline readings. Samples were not significantly different from each other as a consequence of treatment within or between groups.

TABLE 22
Proportion of people that had reported symptoms of respiratory
tract infection in Participant diary 1 (N = 123).

| | Bacillus | Bacillus | Bacillus | Probiotic | |
|---|---|---|---|---|---|
| | coagulans | clausii | megaterium | cocktail | Placebo |
| | (N* = 25) | (N* = 24) | (N* = 25) | (N* = 25) | (N* = 24) |
| Fever (%) | 1/25 (4.0) | 2/24 (8.3) | 2/25 (8.0) | 1/25 (4.0) | 2/24 (8.3) |
| Headache (%) | 6/25 (24.0) | 7/24 (29.2) | 8/25 (32.0) | 5/25 (20.0) | 6/24 (25.0) |
| Stuffed nose (%) | 2/25 (8.0) | 2/24 (8.3) | 2/25 (8.0) | 1/25 (4.0) | 3/24 (12.5) |
| Runny nose thick | 0/25 (0.0) | 0/24 (0.0) | 0/25 (0.0) | 3/25 (12.0) | 0/24 (0.0) |
| Runny nose watery (%) | 2/25 (8.0) | 3/24 (12.5) | 5/25 (20.0) | 1/25 (4.0) | 3/24 (12.5) |
| Sore throat (%) | 0/25 (0.0) | 1/24 (4.2) | 5/25 (20.0) | 3/25 (12.0) | 4/24 (16.7) |
| Dry cough (%) | 2/25 (8.0) | 2/24 (8.3) | 2/25 (8.0) | 1/25 (4.0) | 3/24 (12.5) |
| Productive cough (%) | 0/25 (0.0) | 0/24 (0.0) | 1/25 (4.0) | 2/25 (8.0) | 2/24 (8.3) |
| Sore ear (%) | 0/25 (0.0) | 0/24 (0.0) | 0/25 (0.0) | 1/25 (4.0) | 0/24 (0.0) |

N* = number of participants included in the ITT population

[0248] A significant difference among treatment groups was detected only in the number of days with runny nose-thick (p*=0.018) probably due the fact that only three participants in Probiotic cocktail group had reported this symptom, while in other four treatment groups none of the participants had reported this symptom. However, further analysis (Mann-Whitney U test with Holm's correction) where number of days with runny nose-thick was compared between Probiotic cocktail group and placebo group, did not show significant differences, probably due to the low sample size.

TABLE 23
Proportion of people with clinically relevant infection
reported in Participant diary 1 (N = 123).

| | Bacillus | Bacillus | Bacillus | Probiotic | |
|---|---|---|---|---|---|
| | coagulans | clausii | megaterium | cocktail | Placebo |
| | (N* = 25) | (N* = 24) | (N* = 25) | (N* = 25) | (N* = 24) |
| Gastrointestinal | 0/25 (0.0) | 0/24 (0.0) | 0/25 (0.0) | 0/25 (0.0) | 2/24 (8.3) |
| infection (%) | | | | | |
| Respiratory tract | 1/25 (4.0) | 2/24 (8.3) | 2/25 (8.0) | 3/25 (12.0) | 6/24 (25.0) |
| infection (%) | | | | | |
| Urinary tract | 1/25 (4.0) | 0/24 (0.0) | 1/25 (4.0) | 2/25 (8.0) | 1/24 (4.2) |
| infection (%) | | | | | |

N* = number of participants included in the ITT population

[0249] Kruskal-Wallis test did not show any significant differences in the number of days with clinically relevant infection treatment groups. However, a borderline statistically significant result was observed for clinically relevant gastrointestinal infection. This is probably due the fact that only no participants in the four probiotic treatment groups experienced clinically relevant gastrointestinal infection, while in probiotic group in total 2 days of such infection were observed, which could have happened by chance.

[0250] Nevertheless, compared to placebo, none of the study products containing probiotics showed a statistically significant difference.

TABLE 24
Proportion of loose/hard stool per all stools in
weeks 6 and 7 of the treatment period (N = 121)

| | | | | |
|---|---|---|---|---|
| Bacillus | Bacillus | Bacillus | Probiotic | |
| coagulans | clausii | megaterium | cocktail | Placebo |
| (N = 24) | (N = 23) | (N = 25) | (N = 25) | (N = 24) |

Loose stool (p= 0.033)*

| | | | | | |
|---|---|---|---|---|---|
| mean (SD): | 7% (10%): | 4% (14%): | 4% (10%): | 2% (4%): | 8% (19%): |
| min-max | 0%-26% | 0%-50% | 0%-40% | 0%-13% | 0%-91% |
| p-value vs | 0.591 | 0.150 | 0.271 | 0.186 | / |
| placebo | | | | | |

Hard stool (p = 0.528)*

| | | | | | |
|---|---|---|---|---|---|
| mean (SD): | 22% (29%): | 13% (27%): | 9% (16%): | 15% (27%): | 14% (27%): |
| min-max | 0%-100% | 0%-100% | 0%-56% | 0%-100% | 0%-100% |

*p-value for Kruskal-Wallis test. If p < 0.05, individual comparisons with placebo were calculated (Mann-Whitney U test with Holm's correction).

[0251] A significant difference among groups was detected in the proportion of loose stools in the total treatment period as well as in weeks 6 and 7 of the treatment period. However, further analysis (Mann-Whitney U test with Holm's correction) did not show significant differences, probably due to the low sample size. The participants in the Probiotic cocktail group had the smallest proportion of loose stool per all stools.

TABLE 25
Proportion of people that had reported symptoms of gastrointestinal
infection in Participant diary 2 (N = 118)

| | Bacillus | Bacillus | Bacillus | Probiotic | |
|---|---|---|---|---|---|
| | coagulans | clausii | megaterium | cocktail | Placebo |
| | (N* = 25) | (N* = 24) | (N* = 25) | (N* = 25) | (N* = 24) |
| Loss of apetite (%) | 0/24 (0.0) | 0/23 (0.0) | 0/23 (0.0) | 0/25 (0.0) | 1/23 (4.3) |
| Diarrhea (%) | 0/24 (0.0) | 1/23 (4.3) | 1/23 (4.3) | 0/25 (0.0) | 1/23 (4.3) |
| Constipation (%) | 0/24 (0.0) | 0/23 (0.0) | 0/23 (0.0) | 0/25 (0.0) | 3/23 (13.0) |
| Vomiting (%) | 0/24 (0.0) | 0/23 (0.0) | 0/23 (0.0) | 0/25 (0.0) | 1/23 (4.3) |
| Gases (%) | 0/24 (0.0) | 1/23 (4.3) | 1/23 (4.3) | 2/25 (8.0) | 2/23 (8.7) |
| Bowel sounds (%) | 0/24 (0.0) | 0/23 (0.0) | 0/23 (0.0) | 0/25 (0.0) | 0/23 (0.0) |
| Cramping/stomach pain (%) | 1/24 (4.2) | 1/23 (4.3) | 0/23 (0.0) | 1/25 (4.0) | 2/23 (8.7) |
| Bloating (%) | 1/24 (4.2) | 1/23 (4.3) | 0/23 (0.0) | 0/25 (0.0) | 1/23 (4.3) |

N* = number of participants included in the ITT population

[0252] A significant difference among groups was detected only in the number of days with constipation (p*=0.013) probably due the fact that only three participants in Placebo group had reported this symptom in Participant diary 2, while in other four treatment groups none of the participants had reported this symptom. However, further analysis (Mann-Whitney U test with Holm's correction) where number of days with constipation was compared between individual probiotic group and placebo group did not show significant differences, probably due to low sample size.

[0253] This study has addressed the safety and efficacy of new probiotics, namely Bacillus coagulans, Bacillus clausii, Bacillus megaterium and probiotic cocktail containing Bacillus subtilis, Bacillus megaterium, Bacillus clausii and Bacillus coagulans.

[0254] The gastrointestinal health of the participants at baseline among the treatment groups did not differ between the study groups, which was expected due to randomization.

[0255] The primary outcome of the study (safety) was achieved, as 17 AEs were reported in total with no SAEs. Causality assessment revealed no relation between the reported AEs and the study products.

[0256] None of the efficacy related outcomes showed any statistically significant difference, however this comes as no surprise due to small sample size per study group. Still, some trends favouring active products were observed, specifically in the Gut-brain axis scores and proportion of loose stools.

[0257] To conclude, probiotic products showed to be safe to use in adults, and have shown some favourable data regarding Gut-brain axis and stool consistency.

### DISCUSSION

[0258] The use of Bacillus probiotics in maintenance of gut health has been largely supported in the last years and has driven its clinical applications. Their favorable effects have been linked to several properties, such as antimicrobial and immunomodulatory activity, regulation of cell growth and differentiation, cell-cell signaling, cell adhesion, signal transcription and transduction, production of vitamins and gut protection from genotoxic agents.

[0259] This trial was conducted to evaluate the effect of three probiotic treatments on general wellness and gastrointestinal symptoms in healthy adults. There were no safety or tolerability concerns and no adverse events. With this small study cohort in healthy individuals without any gastrointestinal issues, there were no negative effects on stool regularity and consistency, and no negative effects on sadness, irritability, energy, appetite, tension, stress, sleep, cardiovascular events, aches and pains, and dizziness. In fact, we report a decrease in the incidence of loose stools throughout the intervention period attributable to the administration of the probiotic cocktail.

### REFERENCES

[0260] Abriouel, H., Franz, C., Omar, N., & Galvez, A. (2011). Diversity and applications of Bacillus bacteriocins. FEMS Microbiology Reviews, 35 (1), 201-232. doi: doi.org/10.1111/j.1574-6976.2010.00244.x
[0261] Afrilasari W, Widanarni, Meryadini A (2016) “Effect of Probiotic Bacillus Megaterium PTB 1.4 on the Population of Intestinal Microflora, Digestive Enzyme Activity and the Growth of Catfish (Clarias Sp.).” HAYATI Journal of Biosciences, vol. 23, no. 4, pp. 168-172., doi: 10.1016/j.hjb.2016.12.005.
[0262] Alippi, A. (1995). Detection of Bacillus larvae spores in Argentinian honeys by using a semi-selective medium. Microbiology SEM, 11, 343-350.
[0263] Alippi A, Reynaldi F, Lopez A, De Giusti M, Aguilar O (2004) “Molecular Epidemiology of Paenibacillus Larvae Larvae and Incidence of American Foulbrood in Argentinean Honeys from Buenos Aires Province. “Journal of Apicultural Research, vol. 43, no. 3 pp. 135-143., doi: 10.1080/00218839.2004.11101124.
[0264] Baron, M. (2009). Original Research: A Patented Strain of Bacillus coagulans Increased Immune Response to Viral Challenge. Postgraduate Medicine, 121(2), 114-118. doi: 10.3810/pgm.2009.03.1971
[0265] Benno, Y., Suzuki, K., Suzuki, K., Narisawa, K., Bruce, W. R., & Mitsuoka, T. (1986). Comparison of the Fecal Microflora in Rural Japanese and Urban Canadians. Microbiology and Immunology, 30(6), 521-532. doi: 10.1111/j.1348-0421.1986.tb02978.x
[0266] Chan, Y. K., Estaki, M., & Gibson, D. L. (2013). Clinical Consequences of Diet-Induced Dysbiosis. Annals of Nutrition and Metabolism, 63(s2), 28-40. doi: 10.1159/000354902
[0267] Cutting, S. M. (2011). Bacillus probiotics. Food Microbiology, 28 (2), 214-220. doi: 10.1016/j.fm.2010.03.007
[0268] Dolin, B. (2009). Effects of a proprietary Bacillus coagulans preparation on symptoms of diarrhea-predominant irritable bowel syndrome. Methods and Findings in Experimental and Clinical Pharmacology, 31(10), 655. doi: 10.1358/mf.2009.31.10.1441078
[0269] Elshaghabec, F. M. F., Rokana, N., Gulhane, R. D., Sharma, C., & Panwar, H. (2017). Bacillus As Potential Probiotics: Status, Concerns, and Future Perspectives. Frontiers in Microbiology, 8. doi: 10.3389/fmicb.2017.01490
[0270] Endres, J., Clewell, A., Jade, K., Farber, T., Hauswirth, J., & Schauss, A. (2009). Safety assessment of a proprietary preparation of a novel Probiotic, Bacillus coagulans, as a food ingredient. Food and Chemical Toxicology, 47(6), 1231-1238. doi: 10.1016/j.fct.2009.02.018
[0271] Ferreira, C. M. H., Vilas-Boas, Â., Sousa, C. A., Soares, H. M. V. M., & Soares, E. V.
[0272] (2019). Comparison of five bacterial strains producing siderophores with ability to chelate iron under alkaline conditions. AMB Express, 9 (1). doi: 10.1186/s13568-019-0796-3
[0273] Gabrielli, M., Lauritano, E. C., Scarpellini, E., Lupascu, A., Ojetti, V., Gasbarrini, G., . . . Gasbarrini, A. (2009). Bacillus clausii as a Treatment of Small Intestinal Bacterial Overgrowth. The American Journal of Gastroenterology, 104 (5), 1327-1328. doi: 10.1038/ajg.2009.91
[0274] Gepner, Y., Hoffman, J. R., Shemesh, E., Stout, J. R., Church, D. D., Varanoske, A. N., . . . . Ostfeld, I. (2017). Combined effect of Bacillus coagulans GBI-30, 6086 and HMB supplementation on muscle integrity and cytokine response during intense military training. Journal of Applied Physiology, 123 (1), 11-18. doi: 10.1152/japplphysiol.01116.2016
[0275] Gilliam, Martha. (1979) “Microbiology Of Pollen And Bee Bread: The Genus Bacillus.” Apidologie, vol. 10, no. 3, pp. 269-274, doi: 10.1051/apido: 19790304.
[0276] Gilliam, Martha, and Diane K. Valentine. (1976) “Bacteria Isolated from the Intestinal Contents of Foraging Worker Honey Bees, Apis Mellifera: The Genus Bacillus.” Journal of Invertebrate Pathology, vol. 28, no. 2, pp. 275-276, doi: 10.1016/0022-2011 (76) 90137-3.
[0277] Horosheva, T. V., Vodyanoy, V., & Sorokulova, I. (2014). Efficacy of Bacillus probiotics in prevention of antibiotic-associated diarrhoea: a randomized, double-blind, placebo-controlled clinical trial. JMM Case Reports, 1 (3). doi: 10.1099/jmmcr.0.004036
[0278] Hun, L. (2009). Original Research: Bacillus coagulans Significantly Improved Abdominal Pain and Bloating in Patients with IBS. Postgraduate Medicine, 121 (2), 119-124. doi: 10.3810/pgm.2009.03.1984
[0279] Hyronimus, B., Marrec, C. L., Sassi, A. H., & Deschamps, A. (2000). Acid and bile tolerance of spore-forming lactic acid bacteria. International Journal of Food Microbiology, 61 (2-3), 193-197. doi: 10.1016/s0168-1605(00)00366-4
[0280] Ivanovics, G. & Alfoldi, L. (1957). Bacteriocinogenesis in Bacillus megaterium. J. gen. Microbiol. 16, 522
[0281] Jensen, G., Cash, H., Farmer, S., & Keller, D. (2017). Inactivated probiotic Bacillus coagulans GBI-30 induces complex immune activating, anti-inflammatory, and regenerative markers in vitro. Journal of Inflammation Research, Volume 10, 107-117. doi: 10.2147/jir.s141660
[0282] Kalman, D. S., Schwartz, H. I., Alvarez, P., Feldman, S., Pezzullo, J. C., & Krieger, D. R. (2009). A prospective, randomized, double-blind, placebo-controlled parallel-group dual site trial to evaluate the effects of a Bacillus coagulans-based product on functional intestinal gas symptoms. BMC Gastroenterology, 9 (1). doi: 10.1186/1471-230x-9-85
[0283] Kawarizadeh, A., Nojoomi, F., Tabatabaci, M., Hosseinzadeh, S., & Farzanch, M. (2019). The effect of Bacillus coagulans on cytotoxicity and apoptosis induced by Salmonella typhimurium in HT-29 cell culture. Iranian Journal of Microbiology. doi: 10.18502/ijm.v11i4.1468
[0284] Keller, D., Dinter, R. V., Cash, H., Farmer, S., & Venema, K. (2017). Bacillus coagulans GBI-30, 6086 increases plant protein digestion in a dynamic, computer-controlled in vitro model of the small intestine (TIM-1). Beneficial Microbes, 8(3), 491-496. doi: 10.3920/bm2016.0196
[0285] Khochamit, N., Siripornadulsil, S., Sukon, P., & Siripornadulsil, W. (2015). Antibacterial activity and genotypic—phenotypic characteristics of bacteriocin-producing Bacillus subtilis KKU213: Potential as a probiotic strain. Microbiological Research, 170, 36-50. doi: 10.1016/j.micres.2014.09.004
[0286] Kimmel, M., Keller, D., Farmer, S., & Warrino, D. (2010). A controlled clinical trial to evaluate the effect of GanedenBC30 on immunological markers. Methods and Findings in Experimental and Clinical Pharmacology, 32(2), 129. doi: 10.1358/mf.2010.32.2.1423881
[0287] Kotb, E. (2014). Purification and partial characterization of serine fibrinolytic enzyme from Bacillus megaterium KSK-07 isolated from kishk, a traditional Egyptian fermented food. Applied Biochemistry and Microbiology, 51(1), 34-43. doi: 10.1134/s000368381501007x
[0288] Lakshmi, S. G., Jayanthi, N., Saravanan, M., & Ratna, M. S. (2017). Safety assessment of Bacillus clausii UBBC07, a spore forming probiotic. Toxicology Reports, 4, 62-71. doi: 10.1016/j.toxrep.2016.12.004
[0289] Liu, P., Xie, J., Liu, J., & Ouyang, J. (2019). A novel thermostable β-galactosidase from Bacillus coagulans with excellent hydrolysis ability for lactose in whey. Journal of Dairy Science, 102(11), 9740-9748. doi: 10.3168/jds.2019-16654
[0290] Marseglia, G. L., Tosca, M., Cirillo, I., Licari, A., Leone, M., Marseglia, A., . . . . Ciprandi, G. (2007). Efficacy of Bacillus clausii spores in the prevention of recurrent respiratory infections in children: a pilot study. Therapeutics and Clinical Risk Management, 3(1), 13-17. doi: 10.2147/tcrm.2007.3.1.13
[0291] Mazzoli, A., Donadio, G., Lanzilli, M., Saggese, A., Guarino, A. M., Rivetti, M., . . . . Isticato, R. (2019). Bacillus megaterium SF185 spores exert protective effects against oxidative stress in vivo and in vitro. Scientific Reports, 9(1). doi: 10.1038/s41598-019-48531-4
[0292] Neag, M. A., Catincan, A., Muntean, D. M., Pop, M. R., Bocsan, C. I., Botan, E. C., & Buzoianu, A. D. (2020). Probiotic Bacillus Spores Protect Against Acetaminophen Induced Acute Liver Injury in Rats. Nutrients, 12 (3), 632. doi: 10.3390/nu12030632
[0293] Nista, E. C., Candelli, M., Cremonini, F., Cazzato, I. A., Zocco, M. A., Franceschi, F., . . . . Gasbarrini, A. (2004). Bacillus clausii therapy to reduce side-effects of anti-Helicobacter pylori treatment: randomized, double-blind, placebo controlled trial. Alimentary Pharmacology and Therapeutics, 20(10), 1181-1188. doi: 10.1111/j.1365-2036.2004.02274.x
[0294] Nithya, V., & Halami, P. M. (2012). Evaluation of the probiotic characteristics of Bacillus species isolated from different food sources. Annals of Microbiology, 63 (1), 129-137. doi: 10.1007/s13213-012-0453-4
[0295] Padgham, J., and R. Sikora. (2007) “Biological Control Potential and Modes of Action of Bacillus megaterium against Meloidogyne Graminicola on Rice.” Crop Protection, vol. 26, no. 7, pp. 971-977, doi: 10.1016/j.cropro.2006.09.004.
[0296] Pelletier, A. & Sygush, J (1990). Purification and characterization of three chitosanase activities from Bacillus megaterium P1. Appl Environ Microbiol 56, 844-848
[0297] Ripert, G., Racedo, S. M., Elie, A. M., Jacquot, C., Bressollier, P., & Urdaci, M. C. (2016). Secreted Compounds of the Probiotic Bacillus clausii Strain O/C Inhibit the Cytotoxic Effects Induced by Clostridium difficile and Bacillus cereus Toxins. Antimicrobial Agents and Chemotherapy, 60(6), 3445-3454. doi: 10.1128/aac.02815-15
[0298] Rochín-Medina, J. J., Ramírez-Medina, H. K., Rangel-Peraza, J. G., Pineda-Hidalgo, K. V., & Iribe-Arellano, P. (2017). Use of whey as a culture medium for Bacillus clausii for the production of protein hydrolysates with antimicrobial and antioxidant activity. Food Science and Technology International, 24 (1), 35-42. doi: 10.1177/1082013217724705
[0299] Salvetti, E., Orrù, L., Capozzi, V, Martina Am Lamontanara A, Keller D, Cash H, Felis G, Cattivelli L, Torriani S, Spano G. (2016) Integrate genome-based assessment of safety for probiotic strains: Bacillus coagulans GBI-30, 6086 as a case study. Appl Microbiol Biotechnol 100:4595. https://doi.org/10.1007/s00253-016-7416-9
[0300] Scholle M D, White C A, Kunnimalaiyaan M, Vary P S (2003) “Sequencing and Characterization of pBM400 from Bacillus megaterium Q M B1551.” Applied and Environmental Microbiology, vol. 69, no. 11, pp. 6888-6898, doi: 10.1128/aem.69.11.6888-6898.2003.
[0301] Sharma, S., & Kanwar, S. S. (2017). Adherence potential of indigenous lactic acid bacterial isolates obtained from fermented foods of Western Himalayas to intestinal epithelial Caco-2 and HT-29 cell lines. Journal of Food Science and Technology, 54 (11), 3504-3511. doi: 10.1007/s13197-017-2807-1
[0302] Snowdon, Jill A, and Dean O Cliver. (1996) “Microorganisms with Honey.” International Journal of Food Microbiology.
[0303] Sudha, M., Radkar, N., & Maurya, A. (2012). Effect of Supplementation of Probiotic Bacillus coagulans Unique IS-2 on Hypercholesterolemia Subjects: A Clinical Study. International Journal of Probiotics and Prebiotics, 6 (2).
[0304] Sudha, M. R., Yelikar, K. A., & Deshpande, S. (2012). Clinical Study of Bacillus coagulans Unique IS-2 (ATCC PTA-11748) in the Treatment of Patients with Bacterial Vaginosis. Indian Journal of Microbiology, 52 (3), 396-399. doi: 10.1007/s12088-011-0233-2
[0305] Sudha, M. R., Bhonagiri, S., & Kumar, M. A. (2013). Efficacy of Bacillus clausii strain UBBC-07 in the treatment of patients suffering from acute diarrhoea. Beneficial Microbes, 4 (2), 211-216. doi: 10.3920/bm2012.0034
[0306] Sudha, M. R., Jayanthi, N., Aasin, M., Dhanashri, R., & Anirudh, T. (2018). Efficacy of Bacillus coagulans Unique IS2 in treatment of irritable bowel syndrome in children: a double blind, randomised placebo controlled study. Beneficial Microbes, 9 (4), 563-572. doi: 10.3920/bm2017.0129
[0307] Sudha, M. R., Jayanthi, N., Pandey, D., & Verma, A. (2019). Bacillus clausii UBBC-07 reduces severity of diarrhoea in children under 5 years of age: a double blind placebo controlled study. Beneficial Microbes, 10 (2), 149-154. doi: 10.3920/bm2018.0094
[0308] Sumathi C, Nandhini A, Padmanaban J (2017) “Antagonistic Activity of Probiotic Bacillus megaterium against Streptococcus mutans.” International Journal of Pharma and Bio Science, vol. 8, no. 1, doi: 10.22376/ijpbs.2017.8.1.p 270-274.
[0309] Thakur, K., Tomar, S. K., & De, S. (2016). Lactic acid bacteria as a cell factory for riboflavin production. Microbial Biotechnology, 9 (4), 441-451. doi: 10.1111/1751-7915.12335
[0310] Tysset, C., Durand, C., and Taliergio, Y. P. (1970) Contribution to the study of the microbial contamination and the hygiene of commercial honey. Rec. Med. Vet. 146, 1471-1492.
[0311] Vary, P. S., Biedendieck, R., Fuerch, T., Meinhardt, F., Rohde, M., Deckwer, W., & Jahn, D. (2007). Bacillus megaterium—from simple soil bacterium to industrial protein production host. Applied Microbiology and Biotechnology, 76 (5), 957-967. doi: 10.1007/s00253-007-1089-3
[0312] von Tersch, M. A. and Carlton, B. C. (1983) Bacteriocin from Bacillus megaterium ATCC 19213: comparative studies with megacin A-216. Journal of Bacteriology 155, 866-871.

[0313] The invention is not limited to the embodiment described herein but can be amended or modified without departing from the scope of the present invention.

[0314] The use of the terms “a,” “an,” “the,” and similar referents in the context of describing the present invention (especially in the context of the claims) are to be construed to cover both the singular and the plural, unless otherwise indicated herein or clearly contradicted by context. Recitation of ranges of values herein are merely intended to serve as a shorthand method of referring individually to each separate value falling within the range, unless otherwise indicated herein, and each separate value is incorporated into the specification as if it were individually recited herein. Use of the term “about” is intended to describe values either above or below the stated value in a range of approximately ±10%; in other embodiments, the values may range in value above or below the stated value in a range of approximately ±5%; in other embodiments, the values may range in value above or below the stated value in a range of approximately ±2%; in other embodiments, the values may range in value above or below the stated value in a range of approximately ±1%. The preceding ranges are intended to be made clear by context, and no further limitation is implied. All methods described herein can be performed in any suitable order unless otherwise indicated here in or otherwise clearly contradicted by context. The use of any and all examples, or exemplary language (e.g., “such as”) provided herein, is intended merely to better illuminate the invention and does not pose a limitation on the scope of the invention unless otherwise stated. No language in the specification should be construed as indicating any non-claimed element as essential to the practice of the invention.

[0315] While in the foregoing specification this invention has been described in relation to certain embodiments thereof, and many details have been put forth for the purpose of illustration, it will be apparent to those skilled in the art that the invention is susceptible to additional embodiments and that certain of the details described herein can be varied considerably without departing from the basic principles of the invention.

[0316] All references cited herein are incorporated by reference in their entireties. The present invention may be embodied in other specific forms without departing from the spirit or essential attributes thereof, and, accordingly, reference should be made to the appended claims, rather than to the foregoing specification, as indicating the scope of the invention.

1. A Bacillus clausii strain comprising a purified microbial population that comprises one or more bacteria with a gyrB that shares at least 97% identity with SEQ ID NO: 1;
and/or that comprises one or more bacteria with a 16S rRNA that shares at least 97% identity with SEQ ID NO: 2.

2. The Bacillus clausii strain of claim 1 that shares at least 97% identity with SEQ ID NO: 3.

3. The Bacillus clausii strain of claim 1 wherein the purified microbial population comprises a bacterium with a 16S nucleic acid sequence comprising SEQ ID NO:2.

4. The Bacillus clausii strain of claim 1 wherein the purified microbial population comprises a bacterium with gyrB nucleic acid sequence comprising SEQ ID NO: 1.

5. The Bacillus clausii strain of claim 1 wherein the purified microbial population comprises a bacterium with a 16S nucleic acid sequence comprising SEQ ID NO: 2 and with a gyrB nucleic acid sequence comprising SEQ ID NO: 1.

6. A microbial composition comprising the Bacillus clausii strain of claim 1 together with a comestibly acceptable carrier and/or diluent.

7. The microbial composition of claim 6, wherein a unit dose of the composition comprises 10⁶-10¹³ CFU of the Bacillus clausii strain.

8. The microbial composition of claim 6, further comprising a mucous adherent excipient.

9. The microbial composition of claim 6, further comprising at least one further probiotic Bacillus spp. strain.

10. The microbial composition of claim 6, wherein the microbial composition is formulated as a tablet, a pill, a capsule, a powder, a solution, a suspension, or an emulsion.

11. The microbial composition of claim 6, wherein the microbial composition is formulated as a food.

12. (canceled)

13. A method of treating vaginal infections, urinary tract infections, gastrointestinal diseases, improving immune health, protection against oxidative stress, cleansing and detoxification, improving metabolic health or cardiovascular health, the method comprising the step of administering to a human subject the Bacillus clausii strain of claim 1.

14. (canceled)

15. A method of treating vaginal infections, urinary tract infections, gastrointestinal diseases, improving immune health, protection against oxidative stress, cleansing and detoxification, improving metabolic health or cardiovascular health, the method comprising the step of administering to a human subject the microbial composition of claim 6.

16. A method of improving microbiome within a subject, comprising the step of administering to the subject a composition comprising a probiotic, wherein the probiotic comprises the Bacillus clausii strain of claim 1.

17. (canceled)

18. (canceled)

The application's sequence listing, which the Patent Office published only in electronic form, follows.

SEQUENCE LISTING (3 sequences)

SEQ ID NO: 1 - DNA, 1925 bp, Bacillus clausii
  source 1..1925: mol_type = genomic DNA
atgttggtaaatgagcaaaatcaaacatacgatgaaagccaaattcaagttttagaagggcttgaagccgtgcgcaagcgccctggcatgtatatcgggtcgacaagccaaagagggctgcaccatctagtatgggaaattgtcgacaacagcattgacgaagcgatggctggtttctgtgatgaaattaaagtaacgatcgaggaaggaaacgcccttacggttgaggataatggccgtggcattcctgtcggcatccaagaaaaaatgggccgtccggcggtcgaggtcattatgactacccttcatgccggagggaaatttggcggtggcggctataaagtatcaggcggccttcacggagttggtgcttccgtcgtcaacgcgctgtcgacacacttaacggtcaatgtccatttagacgggaaaatccatagccaatcttatagccgtggtgttcccgatgctgatttgaccgtcataggtgaaaccgataaaaccggcacgactattacgttccagccagacccagaaattttccgggagacggttgaatttgattatgaaacacttgctgcccgcattcgcgagttggcgtttttaaacaaagggctgacgatcaaaattgaggacaaacgaacagaggacggcaaaaaggccacctaccattacgagggtggaatttcgtcgtttgtcaaacacctcaaccgttcaaaagaaacgctccatgaagagccgatttatgtggaaagcgaaaaagacggcatttctgttgaagtagccgtccaatacaatgacggatttacgagcagtatttactccttcgcgaataacattaatacccatgaagggggcacgcatgaatcaggctttaaaacaggcttgacgcgcgttattaatgattacgcccgcaaaaatgggttgtttaaagaaaacgatccaaacttaagtggcgaggatgtccgtgaagggctgacagcgatcatttccgtcaaaattcctgagccccagtttgaagggcaaacgaaaacaaagctaggaaacagtgaagcacgcacaattactgactctttattcagcgaaagttttgcaaggttcctgtctgagaatccaggagttgcccgcaagattgtcgataaagggttgatggcttcccgtgcccgtgaggctgctaaaaaggcccgtgagttgacacggcggaaaagcgccttagaagtaagctcgcttcctggaaagctaaccgactgtacatcaaaagatgcgtcgattagcgaattgtttatcgttgagggcgattctgccggcggttcggcaaaagggggccgagatccccatttccaagcgattcttcctttgcgagggaaaatccttaacgtagaaaaagcccgtctggacaaaattttagcaaacaatgaaattcggatgatcatcacggcaattggcacgggaattggcgatgaatttgatatttccaaagcacgttaccataaaatcgtcatcatgaccgatgccgacgtagacggcgcccatatccggacattgattttaacgtttttctatcgctatatgcgcgaactccttgaaaatggctatgtgtacattgcgcaaccgccgctttataaaattgagcaaggaaaaaacaatgtaacctatgtttattctgaccgggagcttgatgcgcatttagcaactgtggcagaccgcagcaaagtgagcgtccaacgctacaaaggtcttggcgaaatgaacgctggccaactgtgggaaacaacgatggacccacaggttcgcaatatgctccaagtgactctcgctgatgcgatcaaagcagatgagatatttgaaattctcatgggcgaccgagtggagccaaggcgcgattttattcaagaaaatgcacattacgtgaaaaatttggatgtgta

SEQ ID NO: 2 - DNA, 1386 bp, Bacillus clausii
  source 1..1386: mol_type = genomic DNA
tccacctggagagagggtgaaagatggcttcggctatcactaggggatgggcccgcggcgcattagctagttggtaaggtaacggcttaccaaggcaacgatgcgtagccgacctgagagggtgatcggccacactgggactgagacacggcccagactcctacgggaggcagcagtagggaatcttccgcaatggacgaaagtctgacggagcaacgccgcgtgagtgaggaaggccttcgggtcgtaaagctctgttgtgagggaagaagcggtaccgttcgaatagggcggtaccttgacggtacctcaccagaaagccacggctaactacgtgccagcagccgcggtaatacgtaggtggcaagcgttgtccggaattattgggcgtaaagcgcgcgcaggcggcttcttaagtctgatgtgaaatctcggggctcaaccccgagcggccattggaaactggggagcttgagtgcagaagaggagagtggaattccacgtgtagcggtgaaatgcgtagagatgtggaggaacaccagtggcgaaggcgactctctggtctgtaactgacgctgaggcgcgaaagcgtggggagcaaacaggattagataccctggtagtccacgccgtaaacgatgagtgctaggtgttaggggtttcgatgcccgtagtgccgaagttaacacattaagcactccgcctggggagtacggccgcaaggctgaaactcaaaggaattgacggggacccgcacaagcagtggagcatgtggtttaattcgaagcaacgcgaagaaccttaccaggtcttgacatcctttgaccacccaagagattgggcttccccttcgggggcaaagtgacaggtggtgcatggttgtcgtcagctcgtgtcgtgagatgttgggttaagtcccgcaacgagcgcaacccttgatcttagttgccagcattaagttgggcactctaaggtgactgccggtgacaaaccggaggaaggtggggatgacgtcaaatcatcatgccccttatgacctgggctacacacgtgctacaatggatggtacaaagggcagcgaaaccgcgaggtgaagccaatcccataaagccattctcagttcggattgcaggctgcaactcgcctgcatgaagccggaattgctagtaatcgcggatcagcatgccgcggtgaatacgttcccgggtcttgtacacaccgcccgtcacaccacgagagtttgtaacacccgaagtcggtgaggcaaccttttggagccagccgcctaaggtgggacaaatgattggggtgaagtcgtaacaaggtagccgtatcggaaggtgcggctggatcacctcctttctatggagtttttactctagtcga

SEQ ID NO: 3 - DNA, 4277182 bp, Bacillus clausii (residues 1-2,138,591 of 4,277,182)
  misc_difference 324319..324418: note = n= a, c, g, t, or u
  misc_difference 452047..452146: note = n= a, c, g, t, or u
  misc_difference 797519..797618: note = n= a, c, g, t, or u
  misc_difference 1297254..1297353: note = n= a, c, g, t, or u
  misc_difference 1321658..1321757: note = n= a, c, g, t, or u
  misc_difference 1593166..1593265: note = n= a, c, g, t, or u
  misc_difference 2155420..2155519: note = n= a, c, g, t, or u
  misc_difference 2178658..2178757: note = n= a, c, g, t, or u
  misc_difference 2584975..2585074: note = n= a, c, g, t, or u
  misc_difference 2607474..2607573: note = n= a, c, g, t, or u
  misc_difference 2803054..2803153: note = n= a, c, g, t, or u
  misc_difference 2803976..2804075: note = n= a, c, g, t, or u
  misc_difference 3295535..3295634: note = n= a, c, g, t, or u
  misc_difference 3297106..3297205: note = n= a, c, g, t, or u
  misc_difference 3335078..3335177: note = n= a, c, g, t, or u
  misc_difference 3927916..3928015: note = n= a, c, g, t, or u
  misc_difference 3995593..3995692: note = n= a, c, g, t, or u
  misc_difference 3995901..3996000: note = n= a, c, g, t, or u
  misc_difference 4067714..4067813: note = n= a, c, g, t, or u
  misc_difference 4068132..4068231: note = n= a, c, g, t, or u
  misc_difference 4148231..4148330: note = n= a, c, g, t, or u
  misc_difference 4148798..4148897: note = n= a, c, g, t, or u
  misc_difference 4187943..4188042: note = n= a, c, g, t, or u
  misc_difference 4189002..4189101: note = n= a, c, g, t, or u
  misc_difference 4190770..4190779: note = n= a, c, g, t, or u
  misc_difference 4191240..4191249: note = n= a, c, g, t, or u
  misc_difference 4191673..4191682: note = n= a, c, g, t, or u
  misc_difference 4192089..4192098: note = n= a, c, g, t, or u
  misc_difference 4193277..4193286: note = n= a, c, g, t, or u
  misc_difference 4193737..4193746: note = n= a, c, g, t, or u
  misc_difference 4194731..4194740: note = n= a, c, g, t, or u
  misc_difference 4203556..4203565: note = n= a, c, g, t, or u
  misc_difference 4203980..4203989: note = n= a, c, g, t, or u
  misc_difference 4209266..4209275: note = n= a, c, g, t, or u
  misc_difference 4210615..4210624: note = n= a, c, g, t, or u
  misc_difference 4221714..4221723: note = n= a, c, g, t, or u
  misc_difference 4222163..4222172: note = n= a, c, g, t, or u
  misc_difference 4223255..4223264: note = n= a, c, g, t, or u
  misc_difference 4224625..4224634: note = n= a, c, g, t, or u
  misc_difference 4224883..4224892: note = n= a, c, g, t, or u
  misc_difference 4243929..4243938: note = n= a, c, g, t, or u
  misc_difference 4244067..4244076: note = n= a, c, g, t, or u
  misc_difference 4244444..4244453: note = n= a, c, g, t, or u
  misc_difference 4244854..4244863: note = n= a, c, g, t, or u
  misc_difference 4270827..4270836: note = n= a, c, g, t, or u
  misc_difference 4272043..4272052: note = n= a, c, g, t, or u
  misc_difference 4272463..4272472: note = n= a, c, g, t, or u
  misc_difference 4272940..4272949: note = n= a, c, g, t, or u
  misc_difference 4275448..4275457: note = n= a, c, g, t, or u
  misc_difference 4275866..4275875: note = n= a, c, g, t, or u
  misc_difference 4276280..4276289: note = n= a, c, g, t, or u
  misc_difference 4276754..4276763: note = n= a, c, g, t, or u
  source 1..4277182: mol_type = genomic DNA
gatcaccctctcaggtcggctacgcatcgttgccttggtaagccgttaccttaccaactagctaatgcgccgcgggcccatcccctagtgatagccgaagccatctttcaccctctctccaggtggaaaaagggattatccggtattagctccggtttcccggagttatcccagtctaaggggcaggttgcccacgtgttactcacccgtccgccgctaagtttcaaaaagcaagcttcttgaaactccgctcgacttgcatgtattaggcacgccgccagcgttcgtcctgagccaggatcaaactctccgttaaaaagtagtttgacttgctcattgcacaaccgaagttgtggctcactatgattgacgagataccttgtatctcttttacgcttggcttttgttcagttttcaaaggactcgtttgtcgccgttctctcttggcgactcaattaatatatcatgtttgttaaatagcgtcaactatttcaggaaaataatttgtggttttttaaagtaatgcttgtaaactataaaagacggccctagccgtccttagttggaactggccgtccgtataggtacttcccctatctactgatatcttagcttataattctttagatttttccctagtaggtaaaaactgttgttcccgtttttcataaaaccatagtaatttccttacaaatttaagccgagggacaataaaagaaaccattaaagctgaagcgatactaattagcgccccaactaagacatctgcaggatagtgcacacccacccaaatacgagaaaggccaacaaaaaaagcaaccgtcatccatatgtaactccatctttttcgatatatgcagaaaattgcacaaaacgcaaagaataaaatagtatggtcgctcggaaacgaattatctactgctttctctattaattgatttacattagacaattccgcaaatggttgattatttgcatgtaatttcccagcaattttcccgataacctcggctacaataaaggctataatagccgaaattatcatcatcctattttcccttatcctagtaaaccagaacattaaaacaaataaagcaagaacaaaaaccatatattcagctatgaatataaaagtatcgtttagatatgcatgttctttaccaaaatcattaattagtctaaacaaatcaacattcatttgaaataaatccatgcttatacctctccttgaattttatattgatatagaagaagtataagcaatgtgttgttagttaataatcgatttcccttacgtaaaccttacaatgatgcaatgctactcttacaattatgtaataaaatttaagttatttttttcttacactattttgcttcttcgtttaatgacatatctatctaaaaaagagaccgttgttatcaatatcctccaacagtccccataaaatttagtttaatgtattcatgcagctcgtgcagttccctagaccagacaggaggcttttgctttacgaattcgtcgattgcccgccatctacatggagaacttgccctgtcacaaacctggaatcatcagatgccaaatagacgtaagtaggcgctaattcaaatggctgccctacccggttaaagacattgtcccctggaagggcattgtcatcagcggagaaactagcggggatgagcggcgtccatattttccctggagcgacggcgtttacgcggatccctttatcgccaatttgtttggcaagtgcacgggtccatccgacaattgccccttttgtcgccgtataatctacaagctgaggctctccgacataggtaacgaccgatgtcgttccaataatagaactgcctgcctttaaatatggaagggcggctcgagttaaataaaaatgggagtaaaaattgactttaaatgtatggtcaaattgttcatcggtaatatcgacgatggagtgttggggaaattggatgccgacgttattgcaaagaatatcgattttcccaaatgcttcgatcgttttcgcaacaattgtttcacacatctgtttttcactaacatcgccaggcaaaagcaaacaacgttgccccaattcttcaattcgctttttcgtccgttgggcatcttcatgttcatccaaatagctaattaccacatctgctccttctttagcaaaggcaattgctgctgcagcgccgatgccactgtcgccaccagtaatgattgccgtttttcctgttaattttccacttccttgtacattagggttttcaataatcggttttgggaccattaagcgttcaacgccagggtgctttaattgcctttgttctggagcaactagtggaatgtcttcgtaacgtgtaatttttccatagtaaggatattggggatagggtttcgtttgcttatggcgttcaaaccagtcttgtagcgcttttatttccttttctttaaagtccccgtcatttttgcttgccatttgcctctcctccgtcccttttagctattgccaccgtatgtataggcaggcgccgtggtgcccgtcttcgctaaaaaaggataggctcgtaaatcaattgcttgcgtacagtaaagaaaaaggggtgttttcgcttgtatactttttatcctgaagtaactttgctgttggaaaaggacgtcaatcaaaaagaacggatgttttatttaaaggactcttggctagttcctaaaatcgggcctcgcccccctttttatgcctatcctcgttatgggccttcctacccaattatttaacgcgaaacgcacacgaaaaaaaccagctagctcaatacgatgctaactggtttttttgcttttttattctgcgttttcctctgatgtcggttgctcttgctcatcatcgtcttctaagtcatcgacttcgtcgtcgttaatgttcacacgggcgactgtcgctacttcttctccttcgctgacacgaatcaacgtcacgccttgagtatttcggccagtcgttgaaatgccgtctacgttggtgcgaataataatcccattggcggtaacaatcataatgtcgtcttcgtcggccaccattttcaaagagacaagaggaccgtttttatcagtaatgttgcatgttttaatcccttttccgccgcggctttggacccggtattcatcaagtggcgtccgtttgccgtagcctttctcggtaacgacgagcacgctttggttttcatccactacgtccatgccgacaacaccgtcattctcagatagggtaatgcctttgacgccgcctgcagtacgtcccattaggcggacatctgtttctggaaaacggatcgccattccttgtttcgtcccgatcatcacttcacggttgccatcggttaaacgcacgccgtggagtgaatcgccttctcttaaattgatcgcgaacaaaccacctttacggatattcgcaaatgcagacaactttgttcgtttggcaatgccgtgctctgttacgaaaaacaaatacgaatcgtcatcaaagcattcaattgggatgactgtactgatcgtttcgcctggatcaaacggcaacagattaatcgccggaatgccttttgctgttcgacctagttcagggatttcatacccttttaggcggtaggctttccctttgtttgtgaagactaacacggtatggtgcgtgttggtcgtaaacaagtgctggacaaagtcgtcatcattcgtacccatgccttgtacgccttttccgccccgtttttgagcacggtacgtagaaataggcaggcgtttaatgtagccgttatgggtaatagtaataacaatattttgccgtgggattaaatcctcatcttccaaatgttcttcgctcgccgaaatgaccgtccgccgttcgtcattaaatttctctttaatggcaaggatttcttcttggatgacgtcaatgactttctcgtcactagccaaaatcgcacggagttcagcaattcgcgccaacacgtctttgtattcttgttcaagcttatcccgttccaaaccagttaaccgttgcaagcgcatatcgagaatcgcttgtgcttggtcatagctgagttcgaatcgctcaattaagccgtttcgagcgatttctgctgtatccgaaccacggattaaggcaatgatttcatcaatatggtcaagggcaatgcgcaagccttccaaaatgtgggcgcgggcttccgctttgtttaggtcaaactgagtgcgcctgcggatcacttctacttggtgagccaaatattgttccagcgtctgttttaagtttaagacttcaggccggccattcacaagagcaagcatattaatgccaaaacttgtttgcaaagctgtctgtttaaacaaattgtttaaaatgacgtttggatttgcgtctctacgcacatcgatgacaatgttcatgccattgcggtccgaggaatcacgcagttcggtaatgccatcaattttcttgtcacgcactagttccgcgattttttcaatcagacgcgctttattgacttggtatggcagttccgtgacgataatcgactgtttgcctttgttttcgacaatttcggttttagcccgtacggtaatcgagcctcgtcctgttgaataagctttgcgtatgccagagcggccgaggatctcgccgcctgttggaaaatcagggcctggaatatattccatgagctcaggaatactaatgtcaggattttttgctaaagcaagtacaccgtcaatcacttcacctaattgatggggcgggatattggttgccatcccgactgcaatccccgacgttccattgacgagtaaattcggaaaacgggaaggcatcactttcggttctcgctcagtgccgtcatagttatcgataaaatcaacggtatctttgtttaaatcccggactagttccatggaaatcttggacatttttgattctgtataacgcattgccgcggcagagtcgccatcaatggaaccgaagttgccatgcccgttgacgagcatataacgataactaaaatcttgtgccatccgtaccattgcgtcatatacagaagtatcgccgtgtgggtggtactttccaagcacttcgcctacgatccgcgccgactttttatatggtttgtctggcgtcatcccaagctcaaacatggcatacagaatccggcgatgcacaggcttcatgccatcccttacgtctggcagcgcccggctgacaatgacgctcatcgcgtaatcgatgaacgattctttcatttcctcatctatttgtctttctcttagtcttggtacatcttcttcagccattccgtaaacctccagggcagctggcaatgatttgcgtcagccgttcttctacacatccaaatttttcacgtaatgtgcattttcttgaataaaatcgcgccttggctccactcggtcgcccatgagaatttcaaatatctcatctgctttgatcgcatcagcgagagtcacttggagcatattgcgaacctgtgggtccatcgttgtttcccacagttggccagcgttcatttcgccaagacctttgtagcgttggacgctcactttgctgcggtctgccacagttgctaaatgcgcatcaagctcccggtcagaataaacataggttacattgttttttccttgctcaattttataaagcggcggttgcgcaatgtacacatagccattttcaaggagttcgcgcatatagcgatagaaaaacgttaaaatcaatgtccggatatgggcgccgtctacgtcggcatcggtcatgatgacgattttatggtaacgtgctttggaaatatcaaattcatcgccaattcccgtgccaattgccgtgatgatcatccgaatttcattgtttgctaaaattttgtccagacgggctttttctacgttaaggattttccctcgcaaaggaagaatcgcttggaaatggggatctcggcccccttttgccgaaccgccggcagaatcgccctcaacgataaacaattcgctaatcgacgcatcttttgatgtacagtcggttagctttccaggaagcgagcttacttctaaggcgcttttccgccgtgtcaactcacgggcctttttagcagcctcacgggcacgggaagccatcaaccctttatcgacaatcttgcgggcaactcctggattctcagacaggaaccttgcaaaactttcgctgaataaagagtcagtaattgtgcgtgcttcactgtttcctagctttgttttcgtttgcccttcaaactggggctcaggaattttgacggaaatgatcgctgtcagcccttcacggacatcctcgccacttaagtttggatcgttttctttaaacaacccatttttgcgggcgtaatcattaataacgcgcgtcaagcctgttttaaagcctgattcatgcgtgcccccttcatgggtattaatgttattcgcgaaggagtaaatactgctcgtaaatccgtcattgtattggacggctacttcaacagaaatgccgtctttttcgctttccacataaatcggctcttcatggagcgtttcttttgaacggttgaggtgtttgacaaacgacgaaattccaccctcgtaatggtaggtggcctttttgccgtcctctgttcgtttgtcctcaattttgatcgtcagccctttgtttaaaaacgccaactcgcgaatgcgggcagcaagtgtttcataatcaaattcaaccgtctcccggaaaatttctgggtctggctggaacgtaatagtcgtgccggttttatcggtttcacctatgacggtcaaatcagcatcgggaacaccacggctataagattggctatggattttcccgtctaaatggacattgaccgttaagtgtgtcgacagcgcgttgacgacggaagcaccaactccgtgaaggccgcctgatactttatagccgccaccgccaaatttccctccggcatgaagggtagtcataatgacctcgaccgccggacggcccattttttcttggatgccgacaggaatgccacggccattatcctcaaccgtaagggcgtttccttcctcgatcgttactttaatttcatcacagaaaccagccatcgcttcgtcaatgctgttgtcgacaatttcccatactagatggtgcagccctctttggcttgtcgacccgatatacatgccagggcgcttgcgcacggcttcaagcccttctaaaacttgaatttggctttcatcgtatgtttgattttgctcatttaccaacattcttcaccttctcatcagggatcgtctactcactatcgcttaaaagcgcctcccccaattcgtcatttagcaattccaatccatcagacatggaccggcgttttaacgtctgcgaggaaaccggggaaaaatagatgcaagtatcggttacaatgacacttttcactgaatcttctgatgcaatttttttgcaatcgtgtttcgtatcccattcgtgtaaaaaaacggctgtatcttttgccagttcgccttcggcatagggcaagattgcgataatttctatagctggcaaaatgacctctccaccgatgtgaatatacatactttactccaatcgtttcactgtgccttggtctacggaaaagaggcaagcctcagccaacacgctatcatcgagtccacttgtggaagtggtcgttacaaatgtctgcacacgggcttggatcgcctctaacagatgcgattgccgataattgtctagttcagataatacatcgtccaaaagcaaaatcgggtaatcgccaatttccgcatagattaaatcgatttcagctagtttgacagacagcgccgtcgttctttgttgtccttgtgagccgtaggattggacatctaaaccattgacagagaaagaaacatcatcacggtggggcccaaacaatgtggtccccctgcgtacctctgtttcccttttcgtttcgtacgctttatataagtcttcttttattttcgacatattctctatgtctgatacctcaattgacgggatataggaaagagtgagcatttctttaccgcggctaatggattgatggattggcgtggcccattcttcgagccggctaataaattcagcccgctttttcatgacaaatgccgctttgtcaatgagctgctcggttaaaacatccaccattgcataattttgcgagcgtttttgttgcatattttttaagagcacattccgttgctttagtattttcccgtacaaggaaaggctgtttaaataaactggactgatctggccaagctccatgtcgataaagcggcgcctgacttgcgggctgcctttcactaagtcaagatcttcaggagcgaacatgacgacattcagcgtccctacatagtcgctgaggcggcgctgttcaaggccgttaatctttccttttttccctttagccgacaaaatgatatccagttcgacctcgcctgtacgtttttcggctttcgcatgaatgcgtgcgaacggctcttcaaagccaatcatttctttgtctttttgggtgcgatgggatttggctagtgctaccacataaatcgcttccagcaagtttgtctttccttgggcattttcgccgacaaagacattgattttttcgccaaaaacgacagccgttttgctgtaattacggtaagaggacagctcaagcgtgtggataatcatcgttattcctttccaacaatcgtcaatgtgcgcccgtcggccaattcaatcacatccccgtttcgtaatttgcggccgcgccggttttcttcttcgctattcacgcgcggggtgtgctcgctcaaataccattttgccatgcctcccgtatcaatagcgccaatttccttcaagagctggccaagggtaatatactccgtttcaattcgtatttgttccaaggtctacctcacaatcggctggacgaaggaagacagcatactttgcgagaatgctgcctttttcgttagccatataggttttcttccaaatctcgtttgttcatcttttcttatattgtactaaacgtttgcgctgttagccaaccttttttcgccctagtactttaatacgttctgactggcgagaataaatgcaaatagtggtctgagtcaattgggcgaataacgaagggactcatcgcacctgtcaaaaagatttggacttcatcgctgtcaaccactttcaaggcatcaaggatatttttcccattaaacgaaatccgtatttcatccccttcaaattggtcagtagccattttttccgtcacttttcctatttcctgtgatgttgacgtaatttcaatttggttgtcgccaagtgttttgacgtttataacattgttttttgcttccctagataacaacattgcccgttcaagcgtatggaccaattcttttgtttttacgacaaaggacgttttgaactgagtcggtatcatgccagacgttactggatactttccttcaagcagtcttgaaaaaaacaacaagtttccgagtttaaaaaggatttgattctcggttacaacaatttcagccaaatcgcttgtatcctccaaaattttgctcaactcttgcaagctttttccagggatcacgacatttttaaattcgagtccctcatcttggctatcaatctttgttttccgcatcgccaaccgatggctatctgttgcagtacagatgagctccccgttttccgtctcaatgtttacacctgtcaacacgggacgtgtttcctgagtggacacggcaaatacggtttggcgaatgatgttgcgcaacatatcttgcggcaagctaaaaatcaaatcttccttcagttgtggcagacgaggatattcctctggatcaaggccatttaacgtaaaaacagaagaaccagagcggattgttgctgcaaattggtcatgcacttggatttcaatcgtttccccaggcagttttttcacaatctcagcaaagtattttgattgcaacacgatacttcctgcttgttcgatttgcacaatttcacgttcgttttcttcttttggaataaacgattcaatcgataagtctgagtcgctcccggtaagggttaagccatttgcatcagcaaccaatttaattcccgttaaaatgggaatcgttgttcttgatgaaacggcttttgcaacatgttggacatcgtgaaccatccgattccgttcaataatgacatgcataataagaaactccttttcataaatctatatataagtcttttaaatgtcgtagtaatagtactagggcttgtgtatttgtggataagtaagcaaaatgcgtaaagagacagcctattcacatgtgggtagtttgtggataggcttgtttctgttatacacatgttcacatctattgacgcaactgctcggtaatagcttgcactttttgctgcaattcctggtcagtggcaagcagttttgaaatcttttcatgagcatggatgacggttgtatggtcgcggccgccaaattcactgccgattttaggcaatgaagcgtccgtcatttctcgggataagtacatcgctatttggcgcgggaaagcgactgatttagttcgtttctttgctttaaaatcttctagctttacttggaagtgttcgccaacaagcttttgaatgtctgtaattgttagcgttttaggcatcgcatttggaatgatgtcttttaatgcttcagccgccagatcggcgttcatatcttgattaattaaagaagaataggcaacaacacggatgagcgcaccttctagctcacgaatgtttgtatcaatctgattggcaatgtaaagcatcacttcattagggatatccaagttttctgccttcgcttttttgcgcaaaatggcaatgcgcgtttccaaatcaggcggcgtaatgtcggtaatcaagccccattcaaaacgggagcgtaatcggtcttccaaagtcggtatctcttttggagggcggtcacttgaaatgacgatctgctttgattcctcatgcaatgcattgaatgtatgaaaaaattcttcctgtgtttggattttgccggcaataaattggatgtcgtcaatgagcagtacatcgacattgcggtatttgttacgaaaatggacagctttgttgtctcgaatcgcgttaataaattcatttgtaaatttttcagatgacaaatacacaactttcgcatttgggttatgttccattacataatggccaatcgcatgcattaaatgggtttttcctaggccgactcctccatagataaacagagggttataggctctcgcaggagcttccgcaacggctaatgaagctgcatgggcaaagcgatttccagagccaatgacaaatgtgttaaacgtgtatttatcgttaagcatcgtttgcgacagtgtcgtttggccagctacatctttttctggcggggtctgaggtgtttgttcaggtaatgcttcctcttcttggttatgttgaggaataacaaactttggcgtcaatcgcgcacctgtaagctgttcaataatgtcggacgtcagccctgaatagtggtcttcaagccagtcacgtgcaaactcatttggcgcagtgacaatgattgtgtcgttattttggagcgcattcgcttttgttgctcttagccacgtttcatagctaggtttgcttactttctttttcatttcttcaagcactttgttccacagatcatcaatattttccaaaaaaacccctcccttattgcgacataaataagctgtacaacatttgtacaacatctaaaatcaacacgaataattatgcgtgcactgcatagttgtgtataataattattatagtagaaaagcggaaatcccccttatacagtgcgttgtggataagaacgccaacagaaataaaaaacctgtccacaaccttacccacaggctgtggacaggttttttgattaagtcaatgtccacgaaggaaaacaacttaatcatagcaaaaataactagataccgcaatggttctatgtacttatccacaaaaccctgtatctagtgttttgtagttgtccacaacactagatatgtgtaaagggttgtcgataacttgtagacaagaaaaaatggagctcggattttatccacaattgtcgaaaagagggagaagcagtagccgattgaactatctcttgacagaggtagtctattgtctatataattttttagagtgtcttacagagatacaatcctcgaaggaggtggaataaatgggaaaaccaacgttccaaccaaataatcgcaaacgcaaaaagaatcatggcttccgtgcccgcatggcgacaaaaaacgggcgtaaagtgcttgcgcgccgccgtcaaaaaggaagaaaagtattgtctgcatagaccactggcgccagtggtctttttcaagtatgaggagcattgcaggcgagaggtcgtggtcagattgaaaaaagagcaacgaattaaaaagaaccgagagttttcagcggtttttaaaaaagggagttcaatggcgaatcgccagtttgttttatacgtgttgccaaaagagggacaagaccgtttacggctcggcctgtccgtttcaaaacgtgtcgggaatgccgtttgtcgaaatcggatcaagcgccttgtccgcgccgcttttcatgaacttgaaggacagcttcggccagactgtgactatgtagtgatcgcgcgaaatccagcacgcgacctttcctttaaagaagtacggagcagtttggagcacgttatgaaaaaagcgaaagtattggcccctttatatggaaatagaaagaaagatagctgattggtgggaggatgtccgagtttgatgaaaaaaacaggctggctacttgtactggcgagcatgctgttgtttttatccggctgctttagcgtcaatgagcccgttacggctgagagcgaagggatatggaattcgttttttgtgtatccgttatcacggctcattatcctaattgccggctgggtcagtagttatggctgggcgattattgttgtaactgttctgtttcggatcgtgcttttgccgttaatggtcaagcagacgaagagcatgaaagcaatgcagcaactacagcccgaaatgcaaaagctccgtcaaaagtacagtgcaaaagataagaacacgcaaatgcagctaaatacagaaatgcagaagttgttttctgaacataaagtgaacccatttgccggctgtttgcctttgcttgtgcaaatgccgattttcttggcgatttaccacgcaattatgcggacgcctaattttcaaggggaatcgtttgcttggtttgtactaaacaatccagatccttattttattttacctgttttggcatgtattttaacgtttatccagcaaaaaatgatgatggtgcaagacaatccacaaatgaaaattttgttgtatgcgatgccgattatgattttggtggtaggtattttccttcctgcagccgtcattttatactgggttgtcggaaatattttcatgatcatgcaaacatactttattaccgggccaaatgctggcaaacggggcctcgaagcaacagtggaaacagccgctgcttcaaaagcaaaaggaaaccaaggcagccaacggaaaaataacaagaacaagccaaacaagaaaaagaaaaagccgaagaaaaaacgcaaataagaaaggggattaaaagtggcgcatacgttcaaaggtcggacggtggaagaagcagttgccaatgcagtgcagcatttgggtactacggaagaacagttagtctatgaagtcatcgaacaaccacaaaaagggtttttcggtttgtttggcggaaagccagctgtgattaaagctcatgtgccgccaagatctacagacgttgcccgctcctttcttgaagaaaccatttctttaatggggttaaaagctgaactttcggtcgagcaagtaggcaaagaagcgtttttttcgttgcatacagaagaagaaaaagaccaaggtcgtttgattggacgcaaagggcagacgctcgattcattagagtatttaacgaatctggcggcttcccattcgcctagtacggatttcgtcaaagtccggctcgatgccggaggctaccggcacaaacgggaagaaacgctcaagcagctcgcattgcggatcagccataaggcaaaaacgacaaaggaaccgattgtccttgagccaatgccagctcgtgaacgtaaagtcattcatacgacgttggcaaacgatgccggcgtgcagacccattcgcaaggcgaaggagcaaaacggcatgttgtcgttgagccgacgcaattcgactgaaacacgttgtcagacgaggcgtgcaggtgaaggaagaggcgaatagaacgggtgttcatgacatatggctgaggcaaacgacgacgtatgcaagcgattgtctacagtttgaaagggaagcgcatgcttcctttttcttgttcctaaaaatgcagtcaacttcaggcgatagcttttcgcgttttcctgtgctattcttatatgttgaagatatgccttaaggaggtgaaaacgatggaaatggatacaattgcagcaatatcgacggcacttggagaaggggcgattgggattgtccggctgagcggagatcaagcaattgcgattggcgataagttgtttaaagggacaaagcgtttagaagatacgccgagtcacacaattgtgtatggccatttaatggatgatgctagcgaggaagcgattgaagaagcgatggtcacggttatgagagcgccgaggacctatacacgtgaagacattgtggaaatcaattgccacggcgggcttgtgtctgtgaaccgtgtgcttcaagctgtgctggcaaagggagctcgattggctgagccgggagaattcacaaagcgcgcttttttgaatggccgtattgatttgtcgcaagcagaaggcgtcatcgacttaatccgttcaaaaacggatcgggccatgaatgtcgcattgcgccaagtggaagggcgtttgtccaaaaaaattggcaagttgcgtcaagcccttttagaaacaattgcttcgatcgaggttaacattgattatccagagtatgatgcggagacaatgacagctaagcttataaacgaaaaaatgaccattgttttagcggaaattgaagcgttactcgcgactgccaaacaagggaaagtgttacgggaagggctcgccactgccatcattggcaggccaaatgttggcaagtccagtttgatgaacagcctcgtccatgaagcaaaagcgattgtgaccgatatacctggaacaacgagagatacgcttgaagagtatgtcaatgtccgcggcgttcctcttcgccttattgatacagccggtattcgtgaaacggaagacattgtcgagcgaattggcgttgaacggtctcgccaagcgctcaaagaagccgacttaattttgcttgttttaaactatgcagaaaaactttcaaaagaggatgaagctttgttcgaagcggttaaaggactggatgtggtcgtgatcgtcaataaaatcgaccaaacagggcggattgatatggagcgtgtccgccaactagcaggagagaatccagtcgtggcgacttccttcctccaggaagaaggagtcgaccaattagaagaagcaattagtcgtttgttttttgctggtggagtggaaggcgctgatttgacgtatgtgtcaaacgcccgtcatattggtttactaaaccaagcaaaagcccatgctgaagaagcgattgctgcaagtttaaccgatgttcctgttgatttgattcaaattgatgtgacacggacgtgggaattattaggcgaaattattggagaagatgtccaagatagtttaattgaccagttgttctcgcaattttgtttaggaaaataaacacatttttttgtgtagaaaggaaggtaggctgctaggcaatttagcagccgcagccgatatgagttaccaaggtggaacgtttgacgttattgtcatcggcgcagggcatgcgggagtagaagctggccttgctgctgccagaatgggcgccaacacgctcatgttgacattgaatctagatgcagtggcttttatgccgtgcaacccttctgttggagggccggctaaaggcattgttgtccgtgaaattgatgcccttggcggagaaatggggcggaatattgataaaacccatattcaaatgagaatgcttaacacggggaaaggccctgctgttcgagcactgcgggcgcaagcggataaattccgttaccaacaagagatgaaacggacgattgaagagcaagaaaatctgcttcttcgccaaggaatggtggatcgtttaattatcgaagacggagagtgccgcggcgttattacgaatacaggggcacaataccgagcgaaagcggttgttgttaccacaggcacgtatttgcgtgggaaaattatattaggagaactttcttacgagtctggcccgaacaatatgcaaccaagcattaagttgtcagaccacttgaaagagctcggtttcgacctggttcgttttaaaacaggaacgcctccccgtgtccacgggaatacgattgattacaagaaaacagaaatccagcctggcgatgacaaacctcgcgccttttcgtacgagacgaccaaattcattacagaccagctgccgtgctggttaacgtatacgagcgaaaatacacatcaaattatttctgctaaccttggacgttcccctatgtattccggtatgatagaagggacaggaccaaggtactgcccttcgattgaggataaaattgttcgttttagcgataagccaagacatcagattttcttggagccagaagggcgcgatacaagtgaagtctatgtacaagggttgtcgacaagtctgccagaagatgtccaattgtcgatgcttaaaacgattcctggcttagaagaagtccgaatgatgcggcctggctatgcgattgaatatgacgcgatcgtgccaacacaactatggccaacattagaaacgaaaaaaattagcggtttgtttacggcagggcaaatcaatggaacatctggctatgaagaagcagccgggcaagggattatggctggcattaatgcggcccaaaaggcatttggcaaagaaggcgtgatcttagaccgttcagaggcgtacattggcgtattgattgatgatcttgtcaccaaagggacgaatgaaccgtaccgcttgctgacatcgcgggcagagtttcgcttaattcttcgccatgacaatgctgatttgcgtttaacggaaaaaggctacgagttgggattaatttctgaagaacgctattctcgctttaaagcaaaacaagaagcgattgaacaggaaaaacaacgaatttctgcactggttgtaaaaccgtcagacgaagtcaaccaactacttgaacgtttaggttcaaggccgatgacggaagcgttaaaagcaacagcagtgttaaaacgaccagaaatgacttacgaccatttcctgaaaatcattccgcggccagacgtggagcttgatgatgaggtatatgaacaagttgaaattcaagtcaaatacgaaggttatattgagaaacagtggcaacaaattgaacgtttgaaaaagatggaacaaaaacgaattcctgaggatcttgattatgatgcgatccaaggtattgcgacagaagcgcggcaaaaactaaaacaagtacggcctctttcagtaggccaggcttcccgtgtttctggtgtaaatccagcggatatttccattttgcttgtatatctcgaacaagggcggctggcaaaaacatcatcgtaaggaggagcagatgggcgaagaatttttctcctcgttattagcggaacaaaaaatcgtcttatcgtccactcagcacgagcagttcaagcgctattttgaactgctcgttgagtggaacgaaaagatgaatctgactgctattaccgaaaaaaaggatgtatacttaaaacatttttatgattcaatcacgccgagtttttactacccgtttactgaccaaaaaattgttgatatcggcgctggggctggatttccaagcttgccgcttaaaatcctttatcccgacttgcaaatttcgattattgattctttaaataagcggattggttttttaacccatttggctaatgagcttgaattaacaggtgtttccttttaccatgaccgggcggaattggccggaaaaagcaagcatcaccgcgaaatttatgatgttgcaattgccagggcagtcgcacgtatgtccgttttaagtgaactatgtttgccttttgtgaaagtaggcggcgattttatcgccttaaaaggggctggcagcaatgaagaagtggctgaagggaaaaaagcaattgctgttctaggcggagaactttctgcaagccattcattccaattgccaattgaacatagcgaaaggcaaattgtgcaaataaaaaaggcgaaagcaacgccaaacaagtatcctcgtaagcctggggtgcccaataagcagccaatcacgtgaatgttccacgtgaaacatatgtgaatttccaatgagaaaaggaatgctgcgaatatatgtcgaatcaattcaaatggttaaaaacaaaaggtggtgtccgaggcgatgaagcaatcgttttcacgcctatttggcttaaatgataaaaacgacgatgctgaattaactgcaaacgaagaggtacagcagcttgctattaaagatatcgtgccgaatcgcttccagcctagaactctatttgatgaagaccggattgccgaattagcgcaaacgatcaggacgcatggagtcatacagcccattgtcgtccgtgttcgcgatgataaatacgaaatcattgcaggagagcgtaggtggcgtgctgttacttcgttgcaatgggaaaagatccctgctattgtcaaagaatttaatgattcgcaaacagcttcgattgcactaattgaaaatttgcagcgtgaaggcttaactgccattgaagaagctaccgcttatgcaaaattaatcgaaatccataacttgacgcaggaaagtttggcgcaacgccttggcaaaggccaatcaacgattgcaaacaaacttcgattgcttcatttgccacaagcagtccaagacgctattttaaatagagacatttcagagcggcatgctcgcgcgttaattgctttaaaagatgctgaagcccaagaagccgttttaaaacaaatcattgaagagcagttgaatgtgaagcagacggaagaacgagtgaaagcgtattttaaaacagcggaagaagaagcgccaaaaaagaaaaagccgaaacgaaaatcttatccaaaagacatgcgcattgccatgaatacgattcgtcaatcagttgatatggtgatgaaaagcggcttaaaagtcgataccgatgaagaagacaatgaagaattttaccaatttacgatccgcattcctaagaaaaaatgatctatcagctttgataggtctttttttgttgttttttccctaaaatgggtctaattcagtttcacaaactacaagaaaaaatgtatagtagagttagactattaaaatcgctcattaaacacgtaaattgtttagcaataggattgtttgatgttttgcaggaaagcaggaaagaggtgcccatgtgtcaaaaatcatcgctatcgcaaatcaaaaaggcggtgtagggaaaacgacaacatcagtcaatttggctgcttgtttggctcacttaggaaaacgtgtgctgctcgtagacattgacccgcaaggcaatgctacaagtggcgttggcattgaaaaaggcgacgtcgatgaatgtgtctatgatttgctaatagaggatttagatgcacgcaaagttgttaggtcaacagaagtgaacaatcttgacgttataccggctacaattcagttgtcaggggctgaaatcgaactcgtaccgaccatttcaagggaagtacgtttgaaaaaagcattgacgcctttgaaatcccattatgattacatttttattgattgccctccttcacttggattgttaaccattaatgcgttaacggcttcagattcagtggtgatccctgtccaatgtgaatattatgcactggaagggcttagtcaactgcttaataccgttcgcctcgtacaaaaacatttaaatacggacttagcgatcgaaggcgtattgttgacgatgttagatgcgcgaaccaatttaggcattcaagtgattgaagaagtgaaaaaatattttcgtgataaagtatttgataccattattccgagaaccatccggttaggagaagcgccgagctatggaaaaccaattatcgtgtatgatgccaagtcgcgtggtgccgaagtatacatagacttagcgaaggaagtggttgcgaatggctagaacggcaggaaaaaaggggttgggaaaagggctacaagcgttctttccagaacaagaagacaaacaggaagagcaaattgtacaagttgatcttgcagacgtcaggccaaatccgtaccaacctagaaaaacgttttctgaagaagcattaaaggaattgagcaactcgattcgtgaacacggaattttgcagcctgttactgtacgcaaagcgattaaagggtatgaaattgtaatgggcgagcggcgcgtaaaagcggcaaaacaagcaggattaacacaaattcctgtcattgtccaggaactggatgaaaataaaatgatggaaattgcgttaatcgaaaacttgcagcgtgaagatttgaatccaatcgaggaagccattgcttacgagaaattaatggaacatacgaatagcacgcaagagcagttagcaaagcgccttggaaaaagtaggccgcatattgccaaccatatgcgtttgttgcaattgccaaaagttgttcaagagttcatttccgttggcaaactgacaatgggccatggacgcgcgcttttagggctgcaagataagcaaaaactttcacagctgttagaaaaagtgctgcaagacaagcttagcgtgcgggaagtcgaacaactcgtccagagattaaatgaacatgttccacgtgaaacaaagcaagtaaaagtgaagctacctccgattattaaagaacagcaagagcgtttaagggacacgcttggtacatctgtactcattaaacctggaaagaaaaaaggcaagattgaaattgactatttttccgaggacgacttggaacggattttatcgttattggttcatacagaaaaggaatgaagctgtcggctgcgatagcttcttttttaaaggagtggaataatgcggtattttgatcaagcggcaacgtcttttccaatggcaaaagcagttgctgacgctgttagcgaagcgattctagcctacggtgcaaatccaggaagaggaggccataagttagcgaggcaagctgcagacacgctttttcaggcaagaaaacggttggcggctttttttggcgcgccaggccctgagcatatttggttttatccgaacgccacatacgcgttaaatcaagccattcttggcttccctttacagcaaggggatcgggtagttagcaccgcttttgagcataattcggttttgcggccgttgcatatacttgaaaaagaaaagcaggcgacgatcgtttatgcaagcggaaaaacaggggacgagacagcagctgcagtcctggaggcaatgacgccaggtacgcgccttgttgtgatcaatcatgcttcaaatgtcacaggagaaatcgtgcctttaaaacccattgccacaaaagcaaaagaaatcggcgccgtcctgcttgtggatgcctcacaaacagctggcaaaattgcgattgatatggaacaagacggaattgatttgctggcatgtccaggacataaaggcttattagggccacaaggaacaggcttattagcagcagcaagagatgttggcttgaaaccgctcgtacacggcggcacggggcattattccgagcatccagagcagccggacaaatggcctgagcgctatgaagctggcacggccaatacaccaggaattgcaggtttgcttgcaggtttgcaagagcttgaacgtctaggaggagtggaagctgttcatgcccatgaaatggaagcaacacggatctttttagagggaattagcaaccatgagcatgtacatgtagtcggctctttatcgccgcaaggaagagtagcggttgtttcgtttgcaattgacggtgtgagcagccaagaaacggccatgattttagatgaacattatgatatggctgtacgagcaggccttcattgcgcgccgaagctgcacaactggtacaagactgctgaagatgggctcgtacgtgccagttttggaccttatacgaagcaagaggatgtttctgcgcttgtggacgcgattacagacattgccgatgcgttccgctaggatgttaggcaattggctattccgtatgggcgcttaacgatggcgttaaagaggctccgtttttgttggcaaaaaagaataggcttttttcgttttggcagtttgcagtgcggttaattgttggtcagccgcagcaactgccttgcttattttttgagccatgctcatgaccacatgcagccttgtgctttgcagcatataaaaatccatcagccctccgacattgacaatgcctgttaagcaaatatcgccaatttcaggtaagtttttgcccatggctgctccaggtttgagtggttctgcggacaatgtaatatagccaacgtttgcagttttgccaaggcatgcatccaaggcgacaacaaacgcgttagggtgttttttataaatggaggcaagccgtttttccatgttggcggcatggatcggttctgctaacgtcccatgcacgtggaattggtttaagttttgcccttctagtaagtttccaactaaaggccctaacgaatcgccagtcgaacggtctgtgccgatgcaaataagcaacaggtcgcgattgccgcggtgtttgcaaaattcaacaagagcgtgtgcgagatcttccgttaatgatgcttcctcggcatggcagcgaaaggttgtaggtctttttttaaagggccataggtttgtactcataaatgaagctcacctcccatagtagtaacagtatagtagattctgcaagaatctatacatgacggggaaattgaaggtgacgaaaatgtggggaaacggactaaaatggatgtttttaattgtcgggacggtgattggcgctggctatgcttctggacgggaactgtgggaatttttcggggcagaaagcggactggctatcgtattgtttgcgattttattcaccatcagctgtgcggtcatattaaccattgcccaaaaagaaaagacaacccattatttgccgatacttgagaagttgcttgggcggcgcttagcaaaagcgtatgattggatgattattctttacttgttttcagtgacggttattatgcttgcaggcgcaggggcaacactcgaagtatataacattcctttttggctcggcgttgtcattaatgcggcattggtggtgttcatgtttgtaaaggatatgacaggaatgactaaaatcaatgcatgtctcattccagtgctcattatttgcttagtagcggtcttactagtctaccaatcatcaatcggcttttcgttcacatttgacatccatatgcaacataattggccagcggccatgacctttacgtcgcttaatattttgccgattgtcgctgttttaagtgcggtaggcaaccaaatcaaacataagggtgaaatttacattgccagcattggcagcgggctcttgcttgggacgatttcctatttgtacaatgagtcattgctttcggtggctcaagagatcattttttacgagattccgctgtttgtgatcttaaaacattatccgtcgattatggttcttgccatctccttattattgtggctagccatctatacaacggcagcttcaggggtttttgggctgatagcgagattacgaacaaacgtacaaggcgaggcttggctgattgcattgttgcttgtggcttgcatggcgcctatgacgatgtttggcttctcgacactaatttcgatattgtacccattgtacggcattttaaatttgtttattcttgcttcactcgttctttacccaattgtcaaacatccagcaacgaaaagcaaacagtgacactacaaactcctgcttggttcatgtataatacaagcagacgagcttgaggaggacgaaacggtggcagcagaaaaggaatttgcgttaggcgatgtggtggaaatgaagaaaccacatccttgtggggaaaatcgatggaagattatccgcatgggcatggatgtccggataaaatgcctgggttgccaacacagcgtgatgctaccacgccgggacttttcaaaaaaactaaaaaaagtattaggttccgaataacaagggagggtttgtactctaccttgtttttgtgcggacctgtacaaataaaaaggacgtgacaggaagtggctttaacaactggaatagtagggttgccaaacgtgggaaaatcaacgctgttcaatgcgattacccaagcgggtgcagaatcggccaattacccgttttgcacaattgacccaaatgtagggattgtcgaagtgcctgacgtacggttggaaaaattaaccgaactggtcaaaccgaaaaaaacggtgccgactgcgtttgaatttacagatatagccggaattgtcgaaggcgccagcaaaggcgaggggcttggcaaccagtttttgtctcatattcgtcaagtagatgcgatttcccatgttgtccgctgctttgctgatgaaaacattacccatgtttccggtggcgtcaatccgttgcgtgacattgaagtgattaacttggagttgattttggcggatttggaatcagttgacaaacggattggccgtgtcgcgaagctggcgaaagcaaaagacaaagcggctgttgcagaattgcctgtactagaagcattaaaagaggcgtttgaaaatgaaaagccagcacgaagcatcgattttgatgacgaccaactgaaaattgtcaaacagctacatttgctgacaagcaaacctgtcctgtatgtagccaatgtcgctgaagacgatttgcttgctggcgaagacaatgactacgtcaaacaagtgaaagcatttgcggaagcggaaaacagcaatgtgattgtcgtttgcgccaaaattgaatcggaaattgctgagctggaaggcgatgaaaaagcgctgtttttagaagagctcggcatccaagaatcagggcttgaccaattaatccgcgcggcttattctttgctaggcttggaaacgtattttacagcaggagagcaggaagtcagggcttggacataccgccggggcacgaaagcgccacaagcagctgggattatccatactgactttgagcgcggctttatccgtgctgaagttgtcgcctatgacgatttaattgacgctggcggcatggttgctgcaaaagagcggggcaaagttcgccttgaaggaaaagaatacgtcgtccaagacggagatgtcatccattttcggtttaatgtgtaaaagggaggggctgcagccaacgttgcagcctcttgctttgtagattcattttgtcgaaaaaaaatgcaagaaaaaacaaggaattttagttgagatagcgtatatagttggtaacccctttgaaagccccctcatttgctcttacatccttgattcccaattatcgcgacaatttgaacaaaaggcaggtggttgcttcgatacttcttgaataacgactactttaatggtatactcgttcaatgtgagtgaattgacttttgctccttgctctgtgtaaacggagccgcttagaccaaaaggaggtgactggaatgcgtaagtatgaaattatgtacattatcgctccaaacctagaagaatcagcaaacaaggaaatcattgagcgttacaacaaagtgctcactgacaacggtgctgaaattctaaaggtggacgagatcggtaaaaaacgcctagcttatgaaatcaacgatttcaaagatggtttctatgtattgctaagtgtacaagcaaatacggaagcgattaacgagtttaaccgtttgattaaaatcaacgacaacgttatccgcgttctcgtaacaaaagacgaacagtaagtcgaaatagacgtattttaacgggcccaggacgaataagggaccatttaaaaggctgggagggatcgcattgttaaaccgtgttgttcttgtcggacgcttaacgcgtgaccctgaattgcgattcacgccaaacggtgtagctgtagccaattttacgcttgcagtcaaccgtccgttttcaaaccagcaaggagaacgagaagctgacttcattaactgtgttgtctggcgcaaaccggctgagaacgtcgccaatttccttaaaaaagggagccttgcaggagtcgacggccgtgtgcaaacgcgaagctatgacaataatgaaggcaggcgcgtttttgtaacggaaatcgttgctgaaagcgtccaatttctcgaacctcgcaacagtcaaaaccaatcctctgggaataatcctggttttgatcagtacggcgctggcaaccaaggttctggcaaccaaactggtggcagccgttctaatggatatgataacgacccgttctcgaatgacggttcgattgatatttccgacgatgatcttccattttaatgtttaattttaatgtttaaaggaaaggagtgaaacatatggcacgtcgtggtcgtcctaaacggagaaaagtatgcttttttactgccaataaaattacccatattgactacaaagatgttgatttgctgaaacgtttcatttccgaacgtggaaaaattcttccgcgccgcgtaactggaacttctgcaaagtaccaacgtaagctgactgtagcgattaaacgcgctcgccaagtagcattgctaccttacgtcaacgatgtaaactaaagatgggataaagagggcggaccgggccaagctaagaaaaagctggcttggttgccctcttttcttctacttactggcgaatcgagaggctcgccttttactttaaaggtaattacgctaaaatagatgggaactgtgtgtgaatgagacgcgctcgttgagcgtgttaaatgaggtgagaatttggaacacaggaaccagctgatgaagggcttactatgcggtgtgatttacattgcattgttcatgatctttgcatttaacattccgctattaaacatggttgcacttgtcgccatgccgttgccaattgtttattttacggccatttttgggccaaggccgggaatggtgttaacagcggctgttggtttgctcggaacaatagcgacgttaaaccctttggcagcatttgcttttgccgtcattggctatgtgctcggctatgcgcagcataagcgcagaaaaggggctgaattgttgctggcaacgattgtcgcgtcgtttgtctttctttcgactgcctacatactccttacagccgtcacggatctatccgtgctgcaatttgtccgggagtccctccaagagacgcaacagcttttgtctgaattagggatggaatcctacgataaagcatttatagaggaatacgttcaactcattgaatcgctgatgacctttttgttgctactgatggctgccgcgtatgcgtttatggtctatggagcggcgaccatgctctttaaacgtgtggacctaccatatcataagctgccgaagtttcgcgaatgggcctttccacgttttttcctttggttttatttttccctattgctcctgtcatttttgccgtttgagcctggttcctatatggcggcagtcacgcaaactggcataaatttggtcagtgtattgcttatcatccaaggggtgtcgcttctgtttgtgtatttgcaggcaaagcggcttgcaaaaggggtctctgttttcattatcatcatggttgtcatcagtcttttactcgtgccatttttgttgtgggccatgaaaatgattggcgtactggatatggttttaagaattcgcgaccgtatgaaactgtaatttttggatgacaggtaggagatgacaatatgccaaattggaaaaagcagtggtggcaacagcttcatgtcatcgcactctttgttattgccgttgtatccattgctgttctcgcttactatcgcttagaagccggtgccgttgctggcattgctctcatcgtatggatcggtttatttcaccaatcccacaagcgcaatgaacggcagttgcacaaatatatttcgactttatcataccgtgtgaacaaggcaggggaagaagctgttaccaagctgcctgtaggcattgtcctctataatgaggatgaagtgatcgagtgggtaaacccgtttgttgatgaacggtttgggactgggcttatcggcgagcccattacctgcatccatgaagagcttggcgaatatgtaagcaatgacgttgccaatgaaacgttccaaatggagtcctcttactattacatgacgtttgaacgtgacgagcgacttatttatattgtggatgtaaccgagaaagaacaaacgcaaaaaaagtaccaacatatgctgccggtcatcgcgcatatttacttagacaactacgatgaagtcacacaaagcatggaagatcaagttcgcagccggctgctcgccaaagtgaccacagcgttgaacaactgggcgagcgattatgatatctttttaagaaggacgtcctctgatcggtttttggcagtgatgaaccataagacgctattgctcttagaagagaaccggtttgaattgcttgatgatatccgtgaacggacagcaagggagaaagtgcccattacgctcagcattggggtcggcacggaagaaacgtcattaaaacaactgggcgccttggcccagtcaagcttagatctagcgcttgggcgcggcggcgaccaagtggcgatcaaaaagaaaaatggccgcgtccgcttttatggcggcaagaccaacgcgatggaaaaacggacacgggtacgcgctcgcgttatctcccatgctttgcgcgattttgtaaaagaaagcgaacgagtgattgtcatgggtcaccagcgtccagatatggacgcgattggggcagcgattggcgtattgaaaattgctgacttaaatgaccgtgaaggctttattgtgctcgatgtggacgatattaatccggatgtccagcggttattggaagaaacggagaaacacgaccatttgtggagccagtttgtttcgcctgaagaagcattggatttagctgataaagagacgttgctcgtcatcgtcgatacacacaagccatcgatggtcattgagccgcggctattggaaatgattgaccgcatcattgtcattgaccaccatcgccgcagcgaagactttgttgaagatccggtgctcgtttatatggagccgtatgcgtcatctacggccgagcttgtgaccgagttgctcgagtaccagccgatgcagtttaaaatggaccggcttgaagcgacggcgcttctcgctggcatcattgtcgatacaagaagttttgctgtccgcacgggggcgaggacattcgatgcagcctcatttttgcgggccaacggcgccgatacggcgctcgtgcaaaagctattaaaggaagacttggcgtcttacgtaaagcgtgctaagcttgtagaaaacgcctatctttaccgagagggctatgccattgctgtggctccagacgaccatgtttacgatcagctcgtgatcgcccaggctgctgatacgttgctgacaatgagcggcgtgcttgcctcttttgtcgtttgtcagcttgctgatggacgaatcggcattagcgctcgttcacttggcgacgtaaatgtccaagtcatcatggaaaagctcggcggtggcggccatctctcaaatgcagcgacgcaattgcctgacttgacgctggaggaagggaaactccagctcgagaaggccattgatgaagtacgagaaggaggaagcggagcatgaaagtcattttcactgaagatgtaaaagggaaaggcaaaaaaggcgaattgaaagacgtgtcagaaggctatgcccgcaactatttaatccctaaaaatttagctgtggcagctacgtctggaaatataaaagaccttgaggcacaagaaaaaagcaagcaaaaaaaggcggaagcggaacttcaaaaagcgaaagcaatgaaagaagagcttgaagcgctcaagatcgagattcctgctaaagctggcgaaggcggccgcctgtttggggccgtatcgacaaagcaaattgccgaggcgcttgggaaacaaggcaagaaagtcgataaacgcaaaatccaattggacgaaccgattcgttctctcggctatacgaaagtaccgattaaaatccacccagaagtggtggcaacggctactgtccacgttgtagaagcatagaaacaaaaggaagctggctctcgctttggccagcttccttttaagtcagttgtaagggggggagaaatggatgagtgaccttttgacagagcggacgccgccacaaaacattgaagcagagcaggccgtgttaggtgcgatttttctcgctgaccatgcgttaacgacggcgagtgagcgcctcatgcctgaagatttttaccgagctagccaccagcggatttacgaagtgatgctggacctcggtgaaaagggggagcctgttgatttagtcaccgtcacctcagagctgcaaaacagagggtggctggatgatattggcggcgtcgcttatttggccgatgtcgccgagtctgtccctactgccgccaatgttgagtattacagccgcatcgtcgaagaaaaatcgcttttacggcgcctcatccgtgtggccaccaacattgcaaaagaaggctatgcgagcgaggatgaagtcgatgcgatcctcgaccaagcagagaaaacgattctcgaagtcgcacagcggaaaaatacaagcagctttgtctcgattaaagatgtgctgcttgaaacgtatgaccaaatcgaaatgttgcagcaaactcgtggggaaattacgggcattgcgactggttttacggagctagatacaatgactgctggattccagcgcaacgatcttattatcgtcgcagcccgtccgtcagtagggaaaaccgcatttgccctcaacattgcccaaaacgttgccacaaaaaccgatgaaacggttgcgattttctcgctggaaatgggagcgagccagctcgtcacgcggatgctatgtgcagaagggaacatcgatgcccagcggatgcggactggcgccttggaggaagaggattggcataaactatcgatggcgatggggtctttgtcgaaagcaggcatttacatcgatgacacccctggcgtgaaagtcggcgaaattcgtgccaaatgccggcgccttaagcaagaaaaagggcttggcatgattttgattgactacttgcagctcattcaagggaacggccgcagcggtgaaaaccgccagcaagaagtatcggaaatttcgcggacacttaaagcgatcgcccgtgaactagaagtgccggttattgccctgtcgcaattgtcacggggcgtcgaatcaaggcaggacaaacgcccaatgatgtcagacatccgggaatcaggcagtattgaacaagatgccgacattgtcgcttttctctatcgggatgactactatgataaagaaaccgagaataaaaatattatcgaaattattattgccaagcagcgaaacggccccgttgggacggtagagctagcatttgtaaaagaatacaataagttcgttaatttggaccggcgccatgacgagaacgacatgccgccaggttaacggataaagctctctaaaaggagagctttttcgtttttatacgaatgttggggatttttagtatggaaatgttcgtgtctaattgacgccccgtaggctgacctgctatacttacaatggtttttatagagagcggaggtgcaagcaatgtcttcagtcgttgttgttggaacacagtggggcgatgaaggaaaaggaaaaatcacggactacttatcagaaaaagcagaagtggttgcccgctaccaaggtggaaacaatgctggccatacgattgtgtttgacggtaaaaaatacaaacttcatttaattccttcagggattttttacaaagacaaaatttgtgtcattggcaacggcatggtaattgatcctaaggcgcttgtcgaagagcttgcgtatttgcatgaccacggcgtcgatacgagcaatttgcggatttcaaaccgcgcccatgtgatcttgccttatcatataaaacttgatattgtcgaagaagaccgaaaaggcgccaataaaattggcacaacgaggaaaggcatcggtcctgcctatatggacaaagcagcgcggattggcattcgaattgccgatttgcttgaaaaagacacgtttgctgcaaaagtggcagctgttcttgaagagaaaaaccgcctgtttgaaaaatactatgaaacagatggcttttcagctgaagaaattgttgaagagtatttccattatggcgaacaaatcgcgaaatatgttgccgatacatccgtcgttttaaatgacgctttggacgatggccgccgtgttttatttgaaggcgcccaaggcgtgatgcttgatattgaccaaggcacgtatccattcgtaacgtcttccaatccgatcgccggaggagtgacaatcggttctggtgtcggcccatcaaaaatccaccacgttgttggtgtgtcaaaagcatacacgactcgcgttggcgatggcccgtttccgaccgaattggatgatgaaattggcgaccgtatccgcaaagtcggaaatgagtatggaacgacaacagggcgcccacgccgcgttggctggtttgatagtgtcgtcgtccgccacgctcgccgagtaagtggcattactgatttatccctgaactcgattgatgtgcttacagggcttaaaacgctaaaaatctgcacgagttaccgctataaaggcgaagtgcttgatgagtttccagcaagcttaaatgttttggcagaatgtgagccaatttatgaagagcttccaggctgggaagaagacattacaggcgtaaaaacgttgcatgagctgccggaaaatgcccgtacgtatgtagaacgggtttgccaactgacagggattccattgactgtcttttccgtcggcccggaccgtagccaaacgaacatggtgcgcggcgtttttgcctaaatggcaagggaaaatgcagggaaagcgcccctgtattttcccgcttatcttccattcaatcgcgctaaaaaaactttttaaaaagtagttgcacacctagtttttatatgctattataaatcttgtcgccaagggatttggggacaagcggtttgctttttttgcaccgcctgctcggcttttttagaggagccattagctcagttggtagagcatctgacttttaatcagagggtcgaaggttcgagtccttcatggctcaccatgtttacagtggcccgttggtcaagcggttaagacaccgccctttcacggcggtaacacggggtcgaatcccgtacgggtcacttttcatatagatacatatcttggtccggtagttcagttggttagaatgcctgcctgtcacgcaggaggtcgcgggttcgagtcccgtccggaccgccatttacatcttgataaaaagtcgaaagaagcgaaaatggctcggtagctcagttggtagagcaacggactgaaaatccgtgtgtcggcggttcgattccgtcccgagccaccatttgccggtctagctcaattggtagagcaactgacttgtaatcagtaggttgggggttcaagtcctctggccggcatagcggaagaactttatgtgcgaatgcatataaggttctttttttgcattcttcttggcttgcccgtttgtggtaaactaagagatagggcaaaacaattgcccgggaaagaatgttgttatttctaaatgaaggatcttagaacgacgaccaatctaggaggatgaggatggacaaacatattctcgtggtagatgatgaaaagtcgattgctgatatattgaaatttaacttggagaaggaaggctttgatgttacctgtgcgtatgatgggaacgaagcattagagcgcgtcaaggaacggaagcctgatttaatgctccttgatattatgctcccttataaagatggcatggaagtttgccgtgaagtaaggaagcaatacgatttgccgattatcatgttaacggcaaaagactcggaaattgataaagtgcttggccttgagcttggcgctgatgactatgtcatcaagccgtttagcacgcgggaactgttggcacgtgtaaaggcaaacttgcggcgccaacaagtcgctgctgacgatgcgccaaccacgcaaaaagaaattacaattggcgagctatcgattcttcctgaagcgtatcaagtaaaaaaacggggcgagccagttgatttaacgcaccgggaatttgaattgatccattatctcggcaagcatttaggccaagtaatgacgcgggagcatttgctgcaagcggtgtggggctatgattattttggcgatgtgcgcacggtagacgtaacggtgcggcgcttgcgtgaaaaagtggaagacaacccaagctatccaaactggattatgacgagaaggggagtcggctacttcttgtcggcgccagagggcgagcaacggtaaatggaacgcaatgtcgggttttttaaatccattcgctttaaactgattattatttatgtgctgttgattgtattggcgatgcaaattgtcagtgtgtacttttcccgggaactggaaagaagtttgctggaaaactatgaaacactgttaaatgaccgcttaaatgtgctgtctttaagtgtcggccaagaattgcaagaagacccagaagaacgggaccttgatacgcttgtacgcaacgcttttccgcaaaacgatgagaatacacgcaaagggaaagcacaagtgattggctataatagcgttgtgctggcaagctcttccgacgaagacgccaacatcattgaccaacagactgaccaaacgattgtgaagcgcgccttaaccgggacgccgacgtatgaattccaagagcggatcaaccaagaagaccaagagcgctacattattaaagcacaccccgttcgttccaatgaagatggcactggcgaaattctcggtgctgtttacattgaagcgtcaattgaaggggtcagcaagcaagcacaagcgatcaaccgcatttttatatcggcgacaggcattgcaatggtggtaacgttcttggtgatcatactactggcccgaacgatcacgatgccgattcttgacatgcgtcggcaagcgctccgcatgagccatggcgatttttcgaggcaagtccgtgtctacagtaccgatgagttaggccaacttgccactgcatttaacgagctgacgaacaggctccatgacacgacgttaatgagggacagggagcagaagcgtttgcgttcggtgttggcccacatgacggatggcgtgattgcgacagaccaaagtggcttgattatattaatgaaccggcgagctgaagaactgttaggcatcccgttaaagcatgtgctgcgcaggccgattatgaacgtgctgcgcatggaagaggaagtgagcatttttgagctctacgaaaggaacgagccattgctccttgacctgagcacaggcgaagagccgattatgcttgaagtgaacttttcagcgattcaagaagatgaaggcccctttaatggcttgattgcggtccttcacgatgtaaccgagaaagagaaaattgaaaatgagcggcgcgaatttgtcgccaatgtgtcacatgaattgcggacgccgctgacaacgatgaaaagctatctagaagcgttagcagacggggcgatgcaagatgaggacattgcaccgcgctttttagaggtaacgcaaaaggaaacggaccggatgatccgccttgtcaatgatttgctacagctgtccaaaattgactcaaacgattaccgtctcgacttgcattgggtggagcttggtgcctttttgcatagcattgtcgaacggtttgaaatggtcgtcaaggacaaaaacattgattttcaccgccatattgcgaaacagccaacttatgtcaaaatcgataccgataaaatgactcaagtgctggacaacatcttatcgaatgcaattaaatactctccgtctgggggcaatgtgaccattaccctcctccatcaaggaaacaaagcacggattagtattgccgatgaagggttaggcattccagctgagtcacaagataagatttttgagcggttctatcgagtcgacaaagctcgggcgcggaatgttggagggacaggtctcggccttgcgattgcgagcgagtatgtccacgcccatgaaggcgatatttgggtccatagtgaatacaatgaaggcacgaccatttatatcacgttgccttactcgacattcaaaggaggaacaatgtgaggtacgaacagtttaaaactgtcgcgttaattgccttaattggtctaagtttatttttcacgtaccaattgtggacgttccaaccaaatatcgaagcattagaagatagctccaacgtgcaaaccgaagaaatgtttggcacagaacgggacccagttgagctgattgcccctgaacaaatcgtgctgcacagctctgaagggacgtatgcactcgtaaaaaatggctcttcgtatttttctcacgtagtggagcaattgtttgccgaagggcaactgcaatcaattaaccgcgactatgaagacatctccgccgtaagtggaattgaattgatttttcccgatgcagtaccgaaagaatttgtactgaaacaattcgggatcgaacaagaagattttcgcttcaatttaaatgccatcgatcggatgtttgtctatgttagcccttatgacggcggggtcaatattcaatttgcctcattggaaaatgaaagcttatttacggttggctctgcgatggatcctgagttccttactgatttgctcgaatcgggagaggaagcagacatcgaagaggctgtgatcgtgaagcagaaggatgatgacaacaaattgctgcaaaaccggctgtacgtcagcactgaaccgcaaaaagtaagagaaaagcagtatgagcttgcccgtctagacatagggcaaatcaaccagcgtttgttcagcggcgcttctgatgtcccccggcaaaaccagctggatggccaaaatgtctacaccgatgggagccggattgttacgattgaccaacggctacagtatttaagctacagctatccgtttgcagcagacggtattgatacaaacaaccgccacattattgagactgcggctgaatttgtcaatttaaacggcggctggaccgatgactataaggcgatcagttgggcggccagggaaaatagcgaaaccgttgatttccggatgatgattgacggcattcctgtttttggccgcagcaacagcgacaacaaagacaggatgaaaataaccgtcagccgctcaggcacacaagtgattcaatttgaacggccactctttcatttagtcggggctccgcttcaagaccctgaagtggaagtcccgtcaggagaagcagctgcagaagcgttaaaggccgcaacgtcggtcaactgggacgatgtcacggacatccggcttggctacagggccgatatggagaacaactcaaatgccaattttgtgccgacgtggtattatgaaagccaaaatacgtggaaaagagtcccgtttgatgaggagtacaaacaatgaattggagtcgggccaaatccatttttattgtcacgtttttgctgttaaacgtctttttaggcatacagttactggacaaaatccaacaagtgcctgatattgagcaatcaagcgacatcgaaaagcggcttgccgataacaacatctctctcccgtcgaaagaaatcgacatggctggcgcgaaaggcgttgtccttgaaggaagctggacaaccttttcagaagcagagctagacggtcttacagggcagacggcgacgttgtcccaatcacgggaactgattaaagcggctttcgatgaaccgattgacctatcggatattcctggaaacgacaacaacaaagcagcggaacaaaccgactatgccgcttttttagcacagcatattttgcacgggtatgactatatgtttgcaaggcgagaaggatcgtacctttattttaaccagctatataaccaaagcgaaacattcgttaacgaggacgcccctctcattttagaactcgatgaagacgacaaggtcattggctacacacagcgccatttcacctttgaggaaaacccagatgaacggaaaatgattacgtacatggaagctgtcgaaacgctgctaaacaaccattttattaaaagaaacaatagcattgttgaaattgattttggctattatagcctagcggaacaaacgccgcgtttcttttcgcctatgtgggaagtgacagtgaaacgcaacaacgatgaggaagacgatgtacgcatttatttagtgaatgccattttaggcgaacaacatcagtggtatcctgatgaaaaccaagcgattgatggagaaacgcctgaattagaagaaccaagtacagacgaaatgaacgaagcgggcagcacgccttaaagtgtggaaatgagggggaaactagatgagtatgcggttcagcgtgctggccagtggcagtacgggaaacgcgatgtatgtcgaaacggcatcgcagcgccttttaattgatgccggactaaccgggaaaaaactggacgagctgttccagaaaattgaccgcaacccaaaagacattgatgcgctgcttgtcacccatgaacatagcgaccatattaaaggagtcggcgtttttgccagaaagcatcaagtgccgatctatgcgaacgcaaaaacgtggaaagcgatggagaaacagctcgggcagttgtctcttgaccaaaagtttgagttcggccgggagacagtcaagcagtttggcgacatagaagtcgagtcatttggcgtctcccacgatgcagctgaaccgatgttttttgtcttccgccacgaaggcaagaaactcgttttagcgaccgatatgggctatgtgagcgaacgaattaaaaagaccgttgcaggcgccgatacgtacgtgtttgagtccaaccatgatatgaacatgctccgtgtcggccgctacccgtggaacgtcaaacgccggattttaagcgatttaggccatgtgtccaacgaagatgcagcgatggcgttgaccgatgtcgtcgatgacaaacaagccaacatctacttagcccatttaagcctcgacaacaatatgaaagaattagcgcatatgacagtcaagcaagtgttagagcaagaagggcataaagtcggcgaaacgctgcgcctatacgatacggacccttatcaccctacccccctctcgatcgtttaaaaaggggcgaaagcgtaaataaatagaaagaacctacagtattcgtttttttatcaaacttccgcaacagttatcgataattgttaaacgaaggtcaaaaatcgttgaaatgcccgcaaatgcctagaccatcaggcgaacaggggtataataaagatacatagaacgaatacgactgtttagagggaaggggtataatcatgggctactatgatgaccagcaagaaacgcgctaccgtgagccaaataagagctcaaaaaaagtggctggtttgtccgcgtttggcggcgccatcattggcggtgcgcttgtgttaattgcttcacccattatgtcgagcctcggccttggcatagatgattcagcaagtgaaaacaacaacgccaacacagaaccgaataccgagcaaaacgccgagaatgttattaaccttgacgtcaattcagcggtcacggacgttgtaagcaaagtatccgatgcagtcgtcggcgtcattaacatgcagcaagccaacatgttcggatcgaatgaaacaggcgaaacaggcacaggatctggtgtggtttataagaaagaaggcgactcggcattcattgttaccaataaccatgtcattgaaggcgcttcggaaattgaagttgctttaaccgacggaactcgtgttccagcaacacttgtaggccacgatgaactaacagacttagctgtcctcgaaattgacggcgaaaatgtcacaaccgttgccgagtttggcaattccgatgaattaagcgtcggcgaaccagcaattgcgataggaaatccacttggccttgaatttgccggcagcgtcacacaaggcattattagcgcgacagaacgaagcatcccagtcgacttaagcggcaatggccaaattgattggaatgcagaagtgctgcaaacagacgcagcgattaatccagggaacagcggtggcgcacttattaacattaacggcgaagtcatcgggattaactcgatgaaaatttccggcggtgcagaaggattaggctttgcgatcccttcttccatcgtgcagccaaccatcagcgatttagaacaatacggcgaagtgcggcgcccaacactcggcatcacattacgctcgctcaatgaactgccaagttccgctctccaaggaacgttgaacttgcctgaagacgtgacagagggaatcgtcatcgtcggcgtccaaaacggcagcgctgcagccgatgcaggcctgcaagaacgagacgtcatcgtcgaaattgacggcaaagcgattgaaaaccctcaagacttgcgcaaactcttatacgctgaacgagccatcggcgacaccatttccgttacactctaccgtgacggcgacaaacaaacaatcgatgtcacccttgaagaacaaagcgacgtataaacaaatccacagctcccgcgaacgacgcgcgggagctgttttttgctttgtggattgtgcaaaagaagcactcgctgtggatagccaagccatgctataatagcaaacgacgaaagaaaggacggattcaacatgctttacgcctgcacagaacatatcgaactagctctagatgtcgccgtagacgaatgggaagtcgcacccaaaatcgaaaaaactacagacgacaacgacgccacatgtacatactgtggaaacaaagccacatacactgtggcaaaataatcagatatacacactgttgatatgtggataagttatgtggataaactgtttgcatctaaaaaaggagttatacacaagtgaatatcacaattctatctgtcggcaaactaaaagaaaaatacttaaaacaaggcatcgacgaatacaaaaagcgcctaagcgcctacgccaaaatccaagaaatcgaagtcgccgacgaaaaagcgcctgaacatttaagcaccgaagacatgcgcatcatcaagaaaaaagaaggcgaacgcctcctcgccaaaataagcgccgacagccacgtcatcgccctggcgatcgaaggcaacatgaaaacaagcgaacagctcgcaaaaaatattgaacagctcggcacatatggaaaaagcaaaatcgccttcgtaatcggcggttcattaggattgtctaacgacgtgtacgcgcgggcagacgaactgctatcattttcaaaaatgacatttccccaccaactaatgaagctcgtgctatttgagcagctgtatcggagttttcggattatgaggggggagccgtatcataagtaggggggtatctaaggagaaatgcctgtttgtttaggctttgcaatgcaattgatattagaaaaaataaaagaaggtctgagtaacttcatcgctgctcagacttagtgttttgactagtaattttatattttccaatcaagtatttctgctagctcgacgtattcttcattatgcagtaccttgttaaagtgtttttttaattcaatttcacgaaagtcagttataacattgtcttcaataataaagaattgaatgtaattttttttaatgaatgttgctagatgccttggaaaacctaaattctgcaattcaataataattttatcgtttgttccatattctaagtactcagaccaatctatttttccaggtaaacggtcatattcctgaatcttattagttagtagtatataatttgaaacataattttttactttaaatcttaagacgttttctatatctgatacagcattgtttacaactttattaatatgatttctattactaggatcaaacggttcatagaaattattaccaagaagaatatcctttttattagaaacataatactttattatatctttaattattagatttaaaggttttgaatttatccaagagttcattagtactgcatagtaactcaaaacctttttatttttacctaaacgtcttttaccttttgattcctcatctctccaattatagtaatcataaagtgtaatgagtaattttaaacaagcatcatagtccacctcattgggtatattataggaggtgcgtcggcagcgtcagagttggataagagacagactgagaggggggaatatttttaagaaatcatttgaggtaatacttagattcatagtaatgtatctccctaataattaagtttatttttatcttgatgttaactttttcaaattagaaagttttattttaaatggacaacgtgctcctttttagattaaaaataataacttatcaccttctatccatctgaaaattgaatttatgtgtgtttccggtttgtcttaaatcttttgcctaccgctgcttttgagggaaacatttttttatttaatgaatcggtaggtttcttacttgattattttgaaataggatgctgatactatactatatatttaaaagaactgggattctgtcttgtaattttatcttttttcatgaacttcttctaaaagattataattttaaaaaagcgcatatggccaagtggcttatacacgctaaatttttaaggattattcaatcaatgtaatcccaacctacctcttctgaaacttaaatatttccaaacaaatcattgagaatgcaacagaagtaagtaccaagaaggaaataattgcgcctatcaaacttttctccacgtactttgaaagaagatacaaagtaacacttgctacaacaaaatagataacatatcttagatatttcatttggttatatcaatccactcgttaccaggataccaatctcgtttatcgatttgcttagctatttgaagacctacattagcataatctaaagcaaccgagatagctcctccaattacagtagcgatggcaactcctctcactgattttatttttagttttttagcttgtgctgtagctactcttgaaagtgtagccgacgccgcttttttcccttttttcttaacatatgtcttaacagcagcaatacctccaccaactacaccaccaatggctacatttatgacagaaccagtaaggtacatgccaactgcgatttttccttttttcttcttcttagcgtaagccttttcgctaccgaatataaattggacagatttagctaagataggattctcctcagattctaatttagcaatataattttcttctagctcctcctgagccgcttcaatatcgttaaatacgtctgaatcactgtcaaaaaaattaagaagcgcttcttctaataattctacttcttcagtgcctgaaatagccgctgtttcttcaattactttaagcaagttttctttctcttcaccttctaatttagctagatctaagttatctacagcttcttcaacatcaaaatcattgttcaagatctcttcattgaattctgaaaaatcctcgtcagtgttgactccaagttcttcaagctctctgtccgataatccttcaaactcattaatagtcatatcttctaaatccgattcttgatcaaaaaagtgttcttcaaagtctaatgaatctggatcactggcataagaagaaattggttcggaaactgtagtaaaaataaataagaccattgtaacaagtaaaaatttagggatgaaatttttcaaaaaacacaactccttttctttaatttatataaattatatatattttccaatctattatcaatagcttttttaattaaaaaaattactagagtataagagaaaagagggttttggattactagttaggtcattctggaaactatcaaatgtttagcaagaagttttttatacaatactaatggtctttccacctccctccccaaatttccatattgacaaatctgtgaactgttgttaagctccaaatagattcaacttagatctaagttagattcatggtggtgaaaaaagaatgaatcggttgttgttaggtttttatggagacgatttcacgggttcgacggatgcaatggaagcgcttgatcagtatgggttaaagacgattctttttttaaggataccggatcaaggtatgcttaagcgctttgaagctgtggattgtattggtgtggcgggaacggcgcgagcgaaggggaaagcggggatgaaggaggagttagagcctgttttttctttcttgcgtgatctccatcctttttttgtccattataaagtgtgctcgacgtttgattcgtcgcctgaaacggggagtattgggtttgcgagtgatttggcgagacgctattttgagaaaggcagctatcctttgctagtggcggcgccgaacttaggtaggtatacggtgtttgggcatcattttgccgcctttaacaatcaagtttttcgattggatacacatccggtcatggctaggcatcctgttacgccaatggatgaagcggatttggcgaagcatttgcagaagcagacaaagcaaaaaattgcaaacgttaccattcttgatttggaggcaaagtctgcgtcggagattgtgaaaggcgagtcggaagcgggtcttatcgtttatgatgcgcttaatcgtggccatatggaaaaggtttctgaagtgctatgggaaaaaaggggcgaacgagctcagtttgttgttgggtcttcaggtgtggagtatgcgcttggcgaggcgatgaagcgtgaaaagcaaactcaacggacagacagactgaagaagccgagtcaagcggagcggatttttgctgtctcgggaagcgtgtcagatgtaacgaaaagccagttgcttgctgctgaagctgcagggttccacgctattcaaattcctgtggagctgtttacagatgaagcgaaggcagaagcgtttttagcggacgttgcagcgatgattgctgcgaagcaaaaggtggttatttataccgctaaaggggctgatgacccggttattgtggaaacaaggaagcatttgagcgaaagtggtgtagcgaaagacgagatcggcatttttatcggtgaaaagctcggtgcgtggacgaaatcgattttagatcgtgtcgatgtccgacgggtgattatttccggcggtgacacttctggttttgttacatcgaatctcgacatttatgggttggaagtattggattctgttgcgccaggggctcctttatgtttagcatattctgagagcgagaaatttgatggactggaaatcgccttaaaaagcggtcagcttggcggtgagcatttttttgaaaacgtttatcgatctggctctaaataaactaaaggaatgaacgtggacatgttattgaaagatgttgcttatgaaaaaattaaagaaaaaattttagaagagcattacgaacctggccagtttttatcggagcgaacgttaatcgatgagctcggcatgagcaaaacgccgattaaaaatgcattggtgcggcttgaatcggaagggtttgtgaccgtttcttctaagcaaggcatcatcgttgtcgatatatcgatcgaacggatcaatgatatttacaatttgcggattgcgttagagacgtttaattgccaggaaatttataagcgcataacagatgaccaaattaacgagttagaagagaatgtcgaagcaacgaaagtggctgcggctaataaagatgtgaaggcatttgccactttggatcatgagtttcatttagcgataagcgagtttgctggaaacagtgagatcacgaaaattttattaaattatcaggatcatttgcggagaattacgcttcggcatttacggaaagaccctgatcgggtcaaaaaattttatacggagcatgtcgacattttaaatgcattgaaaaccaaaaatgacaactgctctgatttgatgaaaaagcacttgtacgaatcaaagatgatgtattttcaatgattggttggtgcaataaggagagaaacgacgatgaaagctgtttttgtagacgatgcagaaaaaattaacatcaaagaaatcgacataccggtcgtgaaggacaatgacgtgctcattaaagtggccgtggccggtatttgtggatcggacattcatacgtataaaggattgcacccgtttcgaaaaccgcctgtcgtcattggtcatgaagtggctggcgaagttgtgagcgttggccaagcggtaaaacgtgttcaagttggagaccgggtaacggttgaaccgcaaattggcacgggagagagcgaaggcgtaatgacaggccaggcgaacttgtccgataagcgtttggctcctggcatgggcgattggcttgggacaatggctgaatacttcgtctctcctgaggcgcaagtgattaagctgccggatgcggtcagttatgaaaaaggggtgttagttgagccgttggcggttggcgtccatgctgcacgtaaagggggtatccaaccaggggaccgtgtcgcaattttaggtgctggaccgattggcttgttgacgcttatggcggtaaaaacgaaaggggcttcacacgttgtggtgaccgatgtgttagactactcccttgatgttgccaaacaaatgggggcaacggccgcgattaatataaagggcaagccggattggattgaggaagcaaaaagtaaagtcggccggtcattcgataaagtgctaattaccgctggcgtgccaggcatcattaatgattcattgaacttattaaaaaaagggggacgtgctgtaacggtcgcgatgtttcatggccaacaagattttgatgtggaacaactacagcaaaatgaaaaagaaattgttggctgcatgacatacaatcgtcccgatacggaagaagcgttggatatcatcgccaaaggtgcgcttccagttgaaaaagtgatttctcatcaattgtcttacgaacaggctgacaaagggtttgaaatggtcgataaaaagcaagacaactctgtaaaagtgattgtttcatttgaacaggagggctaaaggatgacaagaaaacagtggttatggcctgttgcagctatcgcccttgttttaactggctgcaacgttgggcatgcaaatgaaggcgagccgaaaaagctacgtcttggccatattcaaagtgagtcgaatgcgtggcacaaaggctcactcaaatttgccgaattggtgcatgaaaaaacaggcggctctgtcaaggtagaggtttatccaagctctactcttggcgccgaccgcgacttggttgaaggcatgcaaattggctctgttgattttgctttagtagctggcgtaatgtctaacttttatgaaccctattcgatcttagagctcccttatctattcgaagatttgaatcatttagaggaatttgtctatggagaagatggtaagcgattgcaagaagagacgttagaagcaacaggggtaagagggctggagttttggctccgtggagcacggcagctaacaaccaataagcttgtggagtcacctgaagaccttcgcggcgtaaaaattcgtgtaccaaacattgaggcgtctgtagaaggctggcaggcaatgggggcaagcccgacaccgatgaactttggtgaagtgtattcttctttgcagacaggcgtgattgacgcgcaagaaaatccaattgagttcaccgcaagtgcgagaattcatgaagtccaagactatcttgtaatgacggaccacgtttttggttatgtgcaattattaatgagtgacaaaacgtaccaagagttaacagaggacgaacagcaagcggtcatggaagcggctgaagaagcgcgtatgtaccaaaatgaaatcgtttccgcggaagaagagagcgctttgcaaatgatgctcgatgaaggtgtcgagcaaatcgaagtcgatcaagagccgtttcgtgagtctgttcaacgtgtcaatgagagattagctgataaatacgggagagaactttacgacacgatccaaggtatgagggagtaacgctatgaatacgtacattcgaatcattgatggtattaataatggggttaagtcgattgtatctgtgatgttggcgattttagcagtgcttgttgttttacaagtgatgacacggtttgtgattaatgtgccccttgcatggacagaggaaattgctcgttatttaatgatttatattgtatttctagggtccgggctagcgatgcgccataatcagcatattgccatcgattttttgttagatgtcattccccataaaaacaaagcgagattgcaaacgattattttatcaatatgcgctgtattttgccttgttttagcttactacggagcccagttaacgctcatagttgttgaccagtccaccccgacgttgcaatattcaatggcctgggcctatgcagcaattccccttggtgccctattaatgttattaaacattgtcgccttgcttttgaaaccaaataaggttgaagacagtgtagacagaatagttggtgagaacaaatgatcatcgttttacttgtatcgttactcgtcctcttctttatcggcgtgccagtagcgattgcgctcggtttatcgacgagtatggccatgattgtagcaggcgatgttcctttattaacgcttgcacaacgagcgtttgtatcactcgattcgtttccgttgctggcgattccattatttattttggctggcgtcatcatggaatacggcggcatttcgcaacgacttattaacctcgccaatgcccttactggccatttaacaggaggactagccgttgttacggttgtgacaacaatgttttttgccgccatatcaggctcaagtgtcgctgccactgccgctttaggggcaattttagtgcctgcgatgattagcagagggtacgaaaaagaattttcaggaggcgtgcaagctgtatcagggacacttggcattattatgccgccgagcatcccattgattttgtatggcacagcagtcggggcatcgattggcgacttgtttattgctggaatggtccctggcatccttattggcattggtctaattgtaactgtttatataattgccaaaaaacggaactatgcaaaagaagacaagaaaagtggaaaagaaatcggtacagcgtttgtaaaagcgattccggcactgattatgcctgtaatcattttaggcggtatttatacaggtgtgtttacggcaacggaggctgccggtgtagctgttgcctacgcctttattgtaggggtgtttgtctatagggcgatcacgtttacgaaaatcaaaatgattttgtcacaagcatcgataacgacggcaaccattatgcttattttggcgacagcgggcttgtttagttggattttaacgattgagaatgtaccgcagcaagtggcaagcgtcattacgtcaatttccgaaaatccatgggtatttctcggtatcgttgttctattgctcctcctcgtaggcatgtttatggaaacaaatgcatcgattattattttggcgccgattcttgtgccagtggcatcggaattagggattgaccctgttcacttcggcatcgtcatgattgtcacacttgccatcggcatggtcacgccgccacttgggctcaatctctttgttgtatcaaaaatcgccaacttaaggatggatcggttaacgattagcctcatccccttttatatcactatattgatctgtttattgattgttacgtttattccgtctctcaccatgaccgttgtagagtggatgaaataatcaaagtgaaaaaggagcgttaaaatatgcaaaacgattcgattttgcaagacttgcaaaagacaggcttgtttatgatggaaaaaaaccttgcttggggaacagcagggaatattagtgcaaaatgtgaagatggctatttaatttccgctactgggacctatttaggcgaattagaggtagaggattttgcttattgccaaggaggagagcatcttgctggcaaaaagccttcaaaggaatatgtaatgcatgaaggcatttacgaacagcggccagaaatcggggcggtgctccactcatccccgttttatagcacattgatcgccaacagcgaccttcatttgccatcgaactactttgtcgagtcgatgtattacttagagagaattgtgcgtattccttactatcagccaggcagtaaagagctagcccaagccgttaaagagagagcaaaggaggcaaatgtctttctgctagagaaccacggcattatcgtctgcgatgtgaatctgaaagaagcacgcacggcgttgcaaacgcttgaatacacagcgcgcatgcgtatcacagcattagagaaaggcataaccatcaacggtttaagtgacgatacagtccatcagtttcttcatcactccggctataaaccggtaagacagtggggagaacccaaacaataaatgtaaaacaggttgcaggaagcagcctgttttttcttgaattcctgcttgaacctgtaaaagccagcgaaaggcaacaacgtctctatcaataacgctgcctcgtttctctcttggccgataacggctgctttcaagttatcgatcctgatttttctaggaacaaggtccactagatggaaaatagtctgaagctgtaaaaaaagcactcctagttttcaccggacaaaggggcgaaagaggccacgttactgtaagggagtgtcagaagaagacgattgcacgattaactatgccgaggccatcggaagactcttaaaagaaacgtgcccttttgtttacaaccactattgaacctttatcttaaccatatcgtatatatacccaatttccgttaatggaatggtgatcgaatatgttttctcaatcgattcaaaggcttgtctcacaacttgaataaattcttcttgttgttgattaaaggtttctagattcggatacgaatcaatcggtctttgtgttacaagtctttcaattaaacagcttagatgaacgtacatgctaattcgggttgcatttgaaaaacgtcttcctattaaattttgaaggagttcaagcgcgtcactaagatgttccatgagttggtttggattaagaattgtcaagtggttcagtacactttgcagggagaagtgctttattaaattattattgatcttttgaatgctcgcttcctctacatggggttttaataaatacatcaactcctcctcttcatgtccagaaataatgtcttcaagcggtaaaaaggaaacattctcaatctctggattcgctgttccaacaatgcatattacgtcaaaatcttgaaacacggattccttttcttgattgttctttaagcaaagaaagtcataggcaaccacttgaatgtgttttccgtcgacgcttttttcgagtagctctttaatttttactgctgttccaatgcccgttacgcaagtagtgataatggcttttggacgtttttctaagcgagggtggaaaatcctgtactgtggtttatgagtcaaagtaatttcttctacgatttggtttacagaaagcccttttaacagtttttcgccagcgtcaatggctatctgtgtagttatattgttaacgactgccaccgttgaattgtttaaacaatttagcttcttttggacatctactaaagagcccatgtccacgaatataatcacacctctagaggtatcaactgcgtctaagtaatcatttaaacgacgaataatttctaatgtatcaacttgaagaggcatgtcaaacgatttaaaaatgtgctttcctaataatcgattggctacattcgatatgctactagctgttgaaaacccatgggccacgactaagcactgaatgctttctttaacctgctgattttttaaaccgttaataaataaaacgaggatacatttgtccattacagagaaatgcaagttaaacgtttgtgtgagcccatccatcagctcgttgatgatcaaccactctttttgacaagtccggtctaaaaattgaataaattccaagaccctattttcttctttaatggtcacccgttggtttgaactgtagaagatgaaatgagtgaaagcgatgatcgtatttcccgacagactagatagtacacctgccgaaaaattattgtcgctttttagcgagataaattgtttcacaaattgatggataacggaaaactcaatccgtgtttcttgtaaatccgaataaaatacaagtttgtctatatagtcatttacatacaaactgactctatcgatataaagctgatgatgttcctgtcttgaagcaaattcgctatacttgtttaacaactgttcgtatactttttctaagtcacttttatatttagaggtataagggtcaggatacaattgcccatttgtgtttatagggataagatggtcaataaattggctgtggtcttcgttttccgctttgtctatcatgtatttgtgcatgtcatccgcaggaaagtgctttaaactaatctctaaacgaagcttcttatcagtttctaacgcttccgaataggcttttgcgcaagaataacgaacagcgttttttaaagcgccaatgttgcccgctcggctcgtatccattaagaaatcaagaacgtttgaatgaagaacaatttctcgctttatttccttgctttctgattgatagaaagaggtaatcatttggtatttctcataatctgtacgatcttttaaggaaggcagttccacaatgatcgggattctgcgagtaaacgtggttaaaaaggcttttcccgggagttcagtcgttgcaaagatcaatcttacactagctgctctccattcttcattatcccctaatctatggtatatcccttgatccatgaacaaaaaaagcttctcttgaccttcaggtgttaaccgatgtgcttcatcaaggaataaaatccctccgttcgctttctctataaccccttttttgtcgcgttccgccccagtaaatgctccttttgtataaccaaataaattagccgtaactagttctgggttgtttgcaaattctgcacaatttagtgttacaaagggtgcatcagatttaaggataccttgaatgatggcataatgatggaccagcttggctaaataactctttcctactccactttccccagcaagcaaaaaaggcagccctttcggagggtatgaaattgccgctttgcactgttccacttgttggatgagactgcgatcccagccgattaactcttcaaatacattcacttttaaatcttctaccaaccctaatgccacttccaaatcaaaaaaacttctaaattcattcgtttctaatggaaggttgaacattttttcgagtgtttgtctatgaaaaaagtaaacaggacggctattaatcttgactaattttccttctttgacaagcgtgttcaaataacgactggcagccgtacgctctaatacaaggagttgcgatagctgttttgtttccacaccatcttcaatatcaaaagtatgaggattgacttcctttgtcgactgttccacaagctgtaggatctgagttttcatgagtcaccaaccttatctatccttactcgattgatatatttagggggtgagcaataaactggctacccacccccaactttttattggagcttgctgcccatctgttgatggaacgatgtaaacttaggaatggcagggttaattcctttctttaaaggcaccagagccgctatgagctgaagtggtataagatactcgaatatggatagtatagggtcatttaccagtggcattagcaagtccctgccactctccctttgaatgtcttttccgccgataacataagtctttaacgtatgttcgcctaagaactttctcatcttaagcaaacgcctctgttcttctgctgctccttcacttgccaagaagatcaggtgattgtcttcattgatacaattataaattccgtgcatgtactcttccatctcgtagcctagagctggaatacgaacagtttctaaaatctttagcccgccttctagagctattgcataatgggggccgtagccaatgaccatcaattgtggggcaacggaaaattcattcatgtattggttgacccaactttctgcagatgctattacaacaggcaaattttcaattgtcgcttctatcttacgaatccattcttgataggcctgttcctcataatacccttgctttttcccgacttctagccctaataacaataaagtcagcatcgttgctgccacaccttttgtttttgcacctgcttgttcttctccgcatgcaattggtacaaaaaggtcaggtctcttagcaagttcactatcctttgtagccgtgatgccgacggttttcagcccaccttcctgtgctttagaaatcgctcttaatgtcgataaactctttcctccctgcgaaatgccaatgactagcgtccctttttcaggcgcaatcacttcatttgtgaaacgtgttggatactgaaccttcactgccatttgtaagcttttttctacgaaagcttggacagctacggccgagtgataagaagaaccagatccaacaatcaatatgtttgagacgtcttgacctgtaacgagatcgacaagttcagaaagaatagactgtctttcttctaaaatccttgataatacaacaggtgtctcaccaatatacgctcttactttattatcaacttgtgttttcactttacattcctccattttcatattataaaattccaacccacgttccgagaatgccaagggcaattatgcctaacataatgtaattgactttcacgttctttttcagcatgtaatagataccaaatgtaagtccaagcggaagtgcttgggggagaatatcatctagtgtatcttgcaaagcaaccgatgcaccttccaattgaaattcaattggcgtgctcagttcaataagtgttccggtcatcgcgccaataactagtaatcctagtattccagctgcataggtcaagcggttgatgctcccgccttgatacatcatgtttagaaacgttgtccctttactgtatcccataaatgtgccttgatatcgaacgagcaaatgtggaacattgaagattaataaaaacaaaatggcaccaagtatgtttcccgttgaagctagcgatacaccaacgcctgccgcaataattcgaaaagtaccccaaaagaatgagtcgccaatgccagctaccggtcccattaatgccactttgaccgagttaatagaatctgcatcgaattccttatcctttgccgctttctcttccatggccgctgagagtcccataataaaagtagacatctgtggcgttgaattaaaaaattctaagtgccgttttaatgcctttgcccgttcttcgggattgggataaagctttttcaaaaccgggatcattgaataagcgtagcccaacgcttgcatccgttcgtaattaaatgatccttgcaaggtaaacgaacgccaaaacactttacgcaagtctttctttgtaacttgtagttctggctgagcactcggctcaaccgtttcttttagtggttccattaggtcgcagccccctcattagattgttgaagctggtacataactgtggcaatgatcgcgccaataatagcgaccggaataatatctagccctaaaaagacagcgaggacaaatcctaaaaagaaaaatggcgccaattttttcgaaaatgtcatctgcatgagcaacgcgaacccaagagcagggaacatagctgctgctgcgccgagtccatcggtaacaactgccggaatccactcaatgatgacatttacgacttctgaccctactagaatcccaaggaaactaggtataaaaccgtttaggaagaaaaagaagacgcctaaccaatggagactggctacctttttgaaatttcctgattgcgcataacggtctgccttgtgaataagcggagcattaatcgtacgcacaagcataccaagtgactgtgccagcaatgcgatagggatcgctagtgcaagagcaacttccggtccttcccctgtcataattgcataggcagttccaagaatgccgccggttactgtgtccgggggcgttgctgatccaacccctacaatccccatccagacaagttcaagagtggcaccgacgataatacccatgacaaagtctcccatgaccagcccaacaagtgggcccataacaatgggtctttcaaacatagattgacccaatattcttccatctaatattcccaatgcaccaagcaagccaataacagtggcttgtaaaattaatgtagcatcgatactaatcccctccctttactagctgttaactaccttggagaatatttttttgctatcggtaggtacttggcgaatttccacttctatccctagttcctcaatctctttaaagtgttgaatatcttgatcgtttacatagatcgcacgagaaaccgactgtttcccctcgccagcacgcattccgcctaggttgatgctttgtaagccgacattacttttggcaaaagttaaggcatctgttgagttgtttactagcacaaaaatacgcttgttctgatgctcggtcgattggatatacttaacggcgtcggcaacgctagcaatttcaactgcgactccactaggctttgccaaatttaaagacattttttgaatcgggtcgttcacaactttgtcgtttgccactagaatgacttctgcttctaaatgttttgtccaagaatacgctacttgtccatgaatcaatcgatcatcaactctaaaaaatgtaaccatcattcattgctcccttcgactatgagttagcatgttcttctatcatttgattcacaaatataattccattcttaccttgctcaatacagttattaattgactccctaacatcgagggaagcaggggcatttaataactccaatgcaagaggcaaattcatgcccgttataatgtacacattcttctttcctactttcttattgcacgtattagtgacactccccccaagtacatctgttaaaataaagtactgatcttggtccatgtcacctagttgcaagaattcatcaatttccccctctaactgttggacacttgtgtgaggttccaaactaaccgaccttaacgagtgatctcctccaataatcatttttatcgtgctcaccaattcttttgcaaaatgcccatgtgatgcgaataaataatgtttcaatctataacctccttcgtattttctattgcaattgttgtgccaactagtgtgtaaataaataaatgaaatctcatttgcatagagcttgtggaattgggtgccatcacaagctgaaaaagaaacacactgttttaattattaaggcgaaatcaatagtgtgcgcacactttgtaacgcttagctttgattcaattaaagatgcatccagttgaatttctatttattctcgaacaaggagagcggcttctttctaaaaagctattttaatcggagttgcatcaagggccaccaatcgtgataaacagtaaagaagaaacccacctctctttaaacgtttaatgatagaaatttgtaaaaaacttgcaagacataaggttcagattataaaattgatttatattttaaataaaggagaatcacgatgtcagtgctcttgaaagtggagaacttaaacaagtcttaccctgattctacatttcagctgcaagatgtgtctttttcgataccgtatggctcgattgttgggtttatcggtgacaatggagctggaaaatcgacaacgatgggggcgatcatcggcaatttacatcgaaacagcggttcgatagtgatggagggactagaaattgacggtgatcatcttgctttaaaaaaagacgtaggtgtggtatttgacacgatgaagttgcctacttcattaacgattcgtaagttaagcaaagtcttgaagcatatttataaggaatgggatcagcgattatttaacgagtacataacgatgttttcattgccggaaaatcagaaaatcggaaaattttcaagagggatgtcgatgaagttatcgttggcggttgcattatcccacaatccaaaattattaattttagatgaagcgacggctgggctagacccctcagggagacacgatgtattggacattctatctaaattcgttaaagacaaaacgcgcagtgtcttgctgtcttcccacatcacgagagatattgaaaaaattgccgattaccttatgttcattaaaaacggggaaatcattttaaacgtaagcaaggacaaattactaaatgactttgccgttatcgaatgcacgaaggaagaattcgaaaaagtagaaccagtcgcttttaggaagaaaaatgagttgtatgaagttttcatttcagatcagcaagtagatgcatcaacaatgaagaggaagaagttttcaattgatgatattacgcttttattgatgagaggggaaaggaaatgaaaggcctgttgcttaatcagtatttttctgtcgaaaagagtttttggatgtatctttttggcagtattttgcttgtcggcgctctatttatggtagggaacacgagaatagaaagggttgctacttttgtaccgattgtgtttatggtgtctcctgctctcgaagtattaaaacatgaatcaagttcagggtggaataaatttgctttaacgcttccccttaaaagaaggcaaattgtccaaagtcattatctcttttttgtctcatcggtattgatcggacttgtcattactatgcttctttttagtctagttgaattaatgaaagggaacgttctaacgtcttcttccgtgaattccattatgaatgcaatagggatcgggcttataatgggcgctgtcgcttatccattaacatacatgctcgggactgagaagtcggataccgtattaatcacagccgtttttagctcaattggattgttattattaggcggtttcatattcggtatccttctagagacgattccgttaacatttctgcaacaaggcaatccagacgttttgttttcgttggggtatttaacgatgggcattgtgatttatttggtctcttatttttgggccattaagatttataaacaaaaagaatattagacggcgtaacgcctacgggtaacgcctacgggattcaaaatcccgtaggcgttaggtttgtttagacagaatcgagagcctaccttaaaaaaaggctaagtgccactgtgattagtgctaggaagatataaacaagtcctttgcttgtgtgattttgatgaatttctgttattccttttatggcaactaatacagctaatacaacaactactgtggttatgacaaatgtaaacccgcctgtcaaattgctaatgattagagcaggaatagaaaaaatcgcgaaaacggcccatattatacgttctttcgtctccaattcaaccgctcctttgggaagtaaagatgtgtgccctacctctctaattaccatagcgttatttgctaaaactccttatctgctaacacaaggccataaggtgtatcggtccaatcattcattctcgatacaggcttatcctcttccccgttcacactagtaaaatactcgattatacggcttgtatggatagcagtcataaagatcgccttattagccattttttaattagtagacttgataaccgctatctgatggaatttctaaaaagttgctgcaacggttatggatctacgttaatctattagtgagtcatttcaacaatggctgttcgccaacgtcattccagggatttggaagtggcttttttcttttatactagtatatagacttactcgtgaaagtaggatgcgcagtgcttatttcggtcgttctttactcattaatcgggattttgattggcatactttcaagtttatttggctttgggggagggtttgtcgttgtccctgtcttggttgcgttcttgcctgactccattccgccagattatttgatgcatacggctgttggtacgtctcttgctgtaatgatcattaactcgttcaattcaacgttcaaccatgcgaaaaaaggcaatgtgaagtgggttgtttttaaagggatggttttctatattgccatcggttctttaataggaggagttagtgcggtctatatcaacagcgatattctaaagtttgcctttatcggtttattgttgtacgtcattgtaagcaatctattaaagaaaacatttactatccatgtggaggaccaagattttcggatgccgagccggaaatcaagggggccggtaggggttggcatcgggttgatttcaacgatgttaggtgtcggcggcagtgtgatgacgattccttatttcagaaagcaagggatgcggatgttgaatgcggtcgcccttgcgacgccgctcggcttgccgattgcgattgtgggggcattcacttttttagtcacaggtttgcaaatagaggacatgcctggctccacgcttgggtttatctttattccggctctgtgtggatttacactcggtgggtttattggcgtaccactggggcggtcgtgggcgcaaaaaatccccgatgccgtctattccaaagtgtatttaatcttgctggtcattgtcgtcatcatgatgatgttagaataagcgtaaacgtgccgcctttaagaaaggattgattcttaaaggcggtttgtctatatgtaaagaatggtaggagcataaaggggggaataggcgatacataggatgttttgcttgagcgcggtttcatttatcgtctaaataacaaaagcaataataacgacgacaatgacggaaatcggcactattaaaaaatagagccatgtaaaggtttttaagcttttttcgctgctgtaggaagaatcggtcgatttcatagcgaataacgatacaattaaaccaattaaacaaatcaatccaataatgatatagagcgcaatcatgttgatctcctcgtttcagtaaacattccatagtggctaacaattttaccgtaccatattaaagaaccgtttggaataacgccgctgtttttgtttatgtagaacggcttaaaccgatcttctcctttggccgcttagtcgttttagcaagcgtcctccttcaatgattatcacgccattctctaaaggaaatggtcctatcctcttctccatcggcataaacatagttttaagggggattcctatctcggttttacaaggtgatcgttcgtgtttacacggtgagaagaagggtgcataaaaatttaattgaattttctttttattagtaagggtgataaggaggagtaattcttataaagttgggttgacttataggaattatatggtttaataagacttagtttatgttgtaaaaaatgaatggagttgtgaaggaggagttagattggttttaagacaaaaatggctctaccctggttttcttacagtggcattgttaggcgcttgcaatacggagatgggcgcggatgattcaacccgttctgtagaggagaacggcgaaaacgaagaggaaccaacggttgtagaagatgtaaaggtaaaagcggctgatccatcctcctcacctgcattagcaagcaatcgagggaatacggttgttgttggcttacaggagcctggaggcatctttacgcctcattttaatacaagtggctatgatggaaatgtgcaagctgtcatgtttccgccccttgttgacataaatgaaaagggggagccattcgggcggcttgcagaggattgggacatctcggaagatgaattaacgtatacatattatttacgggatgacctgaaatttgatgacggctcgcctcttactgccaatgatgtagcttttacggtaacgcttttgtttgatccggattatccaggaacgacagatttgacagaaaccaacttggttggcggcctcgattataaggaaggcgatgctgacagcattgcgggcattcatgtaattgacgatcaaatgattgaatttcagctagaagaaccaaatgcgcgggcgttgactctgcttggcggcactgtgcttagtgaaaactattacggagagaaatacgaaaaaggcgacttggattatatgagtgactatcatttaaagccacttggggcaggcccttttaaatttgaggcgtaccatcctggagaagagattcggttctcggccaatgagcattattataatggcaagccagaggtcgatacatttgtgtaccgaacgacggaaggggattcgcaacagtttttccaaactggggaattggattacagcggttttgtcgctacgaaagataattttgaactgctggagtcaatggagtttgccaatattgatctgtatacttcgtcgaattacagttatatcgcctttaaccatgagtccgaggtgtttaaagatccgaatgttcggattgcttttaatttggggctagatcggcaagcatacattgacgctcggtttcaaggatacgcacagctagccaatgtccccgtgtcgcctatttcgtgggcctatacagacgaaatcgaggcgtttccatatgaccctgaagaagcgaagcggcttctagacgaggctggatggaaggaagggcctgacggcattagagaaaaagacgggcagaagttaaccgtctacttctttacaacggatggcagtggcagcaatgatatttttgtaacgctcgcgcaagaaaactataaagacattggtgtcgatttccaaattgaacaaatggattttaatgcgttgctggcacgtgtcgacaacggcgatcatgatctcgtgtctttctcgacaacgatgcagccagacccgcatatcggcgtgcaagcctttcattcaagccatactggcaatacatttagagggtacaagaatgaggaaatcgatcgtttaattgaagcttccgtagctgtaagtgatcttgacgctagggcggaagcctaccatgagctttatgaaaagttaaaagaagatccgccaatcattcttctcaattacaacaaatcgcttgcggcaaccaatgcacgtgtagaaggatttgaaccgaatgggtttcgtggcattagcttaagtttagaaaacttgcgggtggtggacacaccttaaaaagaggggtgtctatccccctctttttaacgtttctgacaaggaggggtggcattggggaattattttatcaaacggctattgtacttaatcccaacgttgattggggcatcgattttgatcttttttttatactcgatgatccctggcaattttattgactccgatccaaatttaactgctgaacgaaaagcagagttatatgcgctgtatgggtttgaccaaccgacaatcgttcgttattttgtgtggattggaaacctgttgaaaggggatctaggctattcgcttcaatttcagcgccctgtcagtgaggtgcttggccattacatatggagctcttttatcgtcgccgcggcgtcgctcattctcacatggggcatcgctttaatggttggcgttgtttctgcgaccaaacagtactctttctatgatgcggccgttactgttcttgtctttgcggcgatggccacgccgtccttttttctcggcttgattgtgatcaaaattttcgcagttgacttcggctggtttcctgccggcggaatgacaacatccggcgttgagtatagtggatttgcttatatgaaagacgtattagaacatatgatattgccggttcttgtgctcacgatgcttgggattggcgggttaacgcggtactttcgcaccaatatgctagaggtgattaagcaggatttcattcgtaccgcccgtgcgaaagggttaagagaaaaagtggttgtttacaaacatgcattaagaaatgcgctgcttcctgcgatcacattgtttgcgtttgagttgccagcgcttttcagcggcgccattattacagaacaaattttcaactggccagggataggggcgatttacatgcaagctttttccgtcagggattatccgctcttaatgggatttacgatgtttatcgctgtcctgacggtgattagcaatttaatcgccgatttgctttatggagtcgccgatccccgggtccgtgttaagtaggaaggaggacagcatggaacagcaaccaaatattcgctcagcgactccttttcctacaggcagtggccagaggtcgtcgctatggaaagaagtgggcaggcgctttattaagaagaaaatggcgttgtttggcttaatagtcctaatcattgtttttttatttagctttgtcggcccgtttttttctccttatacgacagttgggacgaatacgcaggcgattcatcaggcccctagcctttctcattggttaggaacggaccatttaggccgcgatgtgctgacgcgtttaatgttggctgggcgcatttcgctgacagtcgggcttggcgccatggcactggctgtgacgattggcggtattctcgggattttggctggttattacagagggattgtcgatcaaatcattatgagactagccgatgtgttaatgacattgcctggcttgccgttgttgtttattatggcggctgtgatgtcggagtggcgtgtgccggcggaacaacggctctatatcgtcatggtcatgttaagcctcgtaaattggccaggcttggcacgtctcgtgcgaagccaagtactcagcttaagggaacgggaattcatgcaagcgacagacgcgctaggtttaagagacagacggaaagtgtttaaccacttgctgccgaatgtagtgcctttattaatcgtaacggcgacgttaagtgtaggcggagcgatcttgagtgaatctgtgcttagttttttcggtttaggtgtagttccacctacggcttcatgggggaacatgattaacacagcgaatacgctaatcgattttacaaacaggccttggctttgggttcctcctgggttagctattttcatcacagtcatagctgtaaacctcctaggcgacgggcttcgtgatgcgattgatcctaatatgaaaagcaggtgagcgatatgggtaagccaatactgcaagtaagcaatttgcgcacgtgttttcaaacagacgagggcagtgtaaaagccgttgatgatataagtttttcagtaaagcaaggagaaacggtttgccttgtaggtgaatcaggctgtgggaagagtgtgacagcgatgtcgattatgggattgctgcaagggcaagcctctgtaacagggaggatggagttagctggaaatgaattaacaacgttgtctaagggcgagatgaggcggttgcgtggcaacgaattggccatgatcttccaagaaccgatgacttcgttaaatcctgtcttgacgattggtgaacaaatgattgaagttttattagaacataaaccgatctcaaagaaacaagcgaggatgaaggcacttgaactcattaagcgagtcgggattgggcgagaagagcaagtgttaaaatcgtatccacatcaaatgagcggcggcatgctgcaacgaatcatgattgcgattgccctcgcttgtgagccaaaaatgctgattgccgatgaaccaacgacggcactcgatgttacgatccaagcgcaaattcttgaattgttaaaacaactgaaagacagtcaagggatgtcgatgttgttaattactcacgatttaggggttgtcgcggaagttgctgactatgtcgttgtgatgtatgcaggtaaaatcatcgaacaaggatcggtgcacgagattttctttaacccgaagcacccttatacgaaagggttgctccaagcaaagcctgtcatcgggcaaaggaaaaagaaactttataccatcccagggcaagttccgcctttaattgatttgaaaccgtcttgctactttgctgatcgttgcagtcattgcatggacatatgcctcgatcaagcaccttccctcattaatgatggcgatgaggaaggccatcgcgtagcttgctggttatacgagaaggtggcgcaatgacaaacaaaccagtcgtcatggaagtgaatcatttaaaaaagtactatgagacaaaagcttctttttttaatcgccaatcagagctcgtaaaagctgtcgatgatgttagtttcgtcatacatgaaggggaaacgtttggtttagtcggtgaatcagggagcggcaagagcaccattgggaaatcgattcttaacttgcagccgttatctgcaggggaagtcgtttatcggggaaaaaatctccatcgtttaagcaaagcagaaatgagaaaggtaaggccccgtattcagtttgtgtttcaagatccattcagttcgttaaatccccgtttacggattggcgatgctttagcagaaccgttattggaccacggcctcgcgacgaaaaaaacggtcaggcaaaaagtattggaaacgatggagctttgtgggctgccgtcttaccatgtgaataaatttccacatgaatttagtggcgggcaacgccagcggattggcatcgcccgtgcagtcattatggagcctgattttattgtagccgatgaaccagtttcagcattagacgtatcgattcaagcacaaatcattaatttgtttaatgagcttcaagaaaagaaaaagttggcctttttattcatctcccatgatttaagcgttgtcgaacatttatgtgcgcgtattggtgtgctctacttagggacaatgatggagctagccgacagagaccggttatacgaaaacccattgcatccatacacaaaggcattgttatcggctttgcctgtccctgaccctacacacaaaaaagagagaattcttttaaaaggcgacatcccaaatccagcatcaccgccaactgggtgcaaatttcatacgaggtgccctctcgcaaaagatcgttgtcagaaggaagtgcccgcttttagggaagcagagcaagggcatttcgttgcttgccatttcgtttaaatagtgaacaaagaaacaccggccagcccttttgtacataaggctggccggtgttcgttgtcttttagtcccctaagccaaacagctgcaaaaagcgttgccataagctcacgttttcttcggtgttgtcttcttccgtttgcgtttcctccggcaatgttaggcgctctgtttgaaagacgaattggacgttttcaatgacgtcgttgttttctggcgagacgaaggaaaccggttcgaaatcggatttgtcatactgggaaagcatgtcatcaatttcggcttgcatttgttctggcacgtctgctgttgcttcctctagctcttttgcgccattgtggatgtcctccatgccagatgacaactcagtcgacccttctgccgtttcgccaatgccctcgtgaatgtgggcatacgagtcgtttaattgggaaacgccgccggtatagtcggccaacccttcgtgaaactggctatattggctggctacttcgtcgatgccttcacttaattgggcaaagccttcgccgatgtcaatcgtccccaacgcttcctggagcgagctggcgagctcatcgattccagcagcgatgtcctctaagcccgctttgctttcttctaaaacaggctggacggcgtcaaggccttcttttacagctgcataggtgccttttatttcttgccccgcttgatagtaagcaactaattgggcgagtgtgtctgagttagggttgccttcgtacagcgtttggatgtcttcttctgttaaatcgctctcagggatggactccaccgctgctttcaaggcgccataggcttcgccgtaatgggtgcttagctcttctaaaccggccgcagcttcactcatgcctgctgacagttcgtcaaaggcggcaaataacgtgtcatctaatgcaacatctgcttctggcgcgcttgcttcgcttaaagagctgctcagttcatataaaccggcttcaatctcgctcgaagcttggacaagctcgtcgccagaaagggctaattcttcgctgcccgcttggtaatcgcttgaaccgtcctccaattggctgaggccaactgcaagttcatccatccctttcttgatttcgcccatccctgttgccagctcgccaatcgcgccagtcaacgtgcccatttcctcttctagttcccctgtgtcaggggcttcgactgccatagaagcgggcaatgccgatatttcgatgccagtaaactcaaattgctcgacatcagcagagaggtggaaggaggcgctttcttcaggcatgactgtaaaagctgcttgtttgtctttgcctacattggcaatcgtggcgtctggcgcttctatgttgtgaaacacatcgctttgcaggggcacggacagttgcagcaaataattctcaaaaaaggtcgtgtccgctttttcgttctgtttgacctcgatggcgatttcaaccaatccgctttccccgatcaactcttgcgggttgatggattggccgtccaatgagtaggaaatgtcaaatgtccaaggcagctccgtgtcggctggcaaattgccttggtaataaaacatgcctgcaggagcagttacttgccagccatcctcggattgctcaattggggacaagtcggttaagttaatgacttgttcgtaagcgccaaaatcgctgatgtctccttccgtagcgacatcaaagccatttactacataaatgtcctttaaggagccgttagcaagcaagttggcgtaaacgacttcgtctttggcagccacttccccgtgtccgtttgcctctgcttgaaaagaaatcgaagggatgcagagtacagcgatcgtacacgcagttgccatttttcgtaacgtcataatgagtcctcctccttgtaaaagttggcccgatgcgttgttttctcgatcaagcggtcggcgatcaaaaggaacgccggaaggaataatatgaccaataggaaggcgagggcagcccccctgccgagcaataatccaatcgatgagacagtgggattgcttgacgtaaaccataaaatgaacccaacacttgataaaatcgccgcagaaacagcaattggaaacaatttttcatcaagcgcccgcttcattgctgcaaaggacggcatcatctggcggtgatgtttatacgtttccatcagcaaaatcgcataatcgatcgttgcggctaactggacggtactgacgatcaaatagccgacaaacacgagtggctcgtttgtaaaataaggcaccgacaggttgagccagacagccgcctgaatggtgagcaacaatataatcggtatcgaaatcgaccggaacataaacataagaacaacggcaatcgtggtgatcgtcacgatgttaacgagctggttgtctttgctgattgtttgtttcatatcatacagcgtcgcgctttcccctaatgtataaaacgcatcgccgtaatagttttgcgcgatttcacgtatctgttccacgagcgcaaatgggagatccccctcgacgccggcagatgtatagacggtaatgcggctgtagttttccgaatggaaatcgctcgtcaattcatcatcgagaaaatcagaagggatcgctgccccgaccatgttggcataggcaagcacggactcgacagagggaatctgttccaactcttggacaagcttttcttctttagcgatgtcgtcattagggacgagcaagacaatcggcgttgattgcccgaacgtttcctcgacttgtttcgcatcggcgccagcgcgtgtctgttcaggcaagtccccaagcccataaagaaaggtggtgctgctttgcgccaaaaaacttggaacgagcagcaggaggacaaggacgagagtgggaatccgcagcttaagcagcttggccccgctgcctttgaagctcggcaccaagcttcgatgcgtcgttttttcgatccatttgtaacaagtcagcgtcaacgcaggcaaaaacacgacgactgatataaagctgaacacaattcctttgacgaggttaaaccctaaatcgacgccaattccaaagtccattagcatgagcgacatgaatccaaaaaatgtcgttaaggcactgacaaagataaccggaaacgatttgcgcatcgcttttgccatcgcttctttcggcgattgatgttggtccagctcgtctgaaaaggtatgtaaaaggaatatggcataatcaagggaaacagcgagctgtaaaataggcgccactgcttgtgtcacgaatgaaacttcccctaaaaaaatgttcgttcctaaattgatgaggacggaaacgccgatcgccgttaggaaaaacaatggctcgacccatgacttggtcgataacaccaaaataatgataataattggaacgagcaacgctgcagcatagagcgtctcggaaccagtcattttctgggacgtagctgtgttaaccgcttcccctgtaacggcgttttcttcgccaatcaatgaataaatcgcgtctgtcgccgctacttcggcaccgctgtcaattgttaccgaaaacaaggcgtcacggtctttgtaatatgtttcaattaagcttgtgtccgccatttcgagaggaatccgaatatcaaacacgtcatcgagccacgatacgtcgctcacgccatcaatgcttgctagttgctctttataacgaatcgcttcttgaatggagacgtcatgaatgagcacgtttgtattcggcattgctgagcgaaactcttcctccattaacgccaagccttcagtggaaggagcatcatctggcaagtaatcaaccatattgtagttggtcgatacaaaaaattgagctaccgctgcgaaaagggcagtgatggcaaataaaaggataatgccttttttatgctttatgatggtatcgacgaacaagcgcgtatcacctcttttgttgacaatcgtttcaatgcatttcatattataacgacacagtgttgggcaaacaacacacagtcggttataatctgttgtgaatccaacagatttcccttgtttgttggctaacgcaaaaaaggtgggaagaagatgtctgagaagatcgaccgaagaaagaaatatacaaaaatggttttgaaagaaagcttggttgatttgttgaaagaaaaaccaatttcctctgtgacagtcaaagagctatgcgagcttgctgatattaaccgatcgacattttacagccactatgccgacccgtatgacttgcttgcgacaatcagtgaagaagtgatgctcgatatgaaccatcatttgaacgagtatcattgtggcaaagaagaagaagctttgcatatgacagaaaagattatggagtatatcgccgaccgaagcgatatttgccaagtgctgttaagtgggcacggcgatgtcacctttaaaaagcgaattatggagctcgcaaaaacgcacatattagaaaagtggatcgaccagtacaaattgcgaggaaagctctctccttatatcccgttaatgattgtgagcggggcaattgacgcaattgaaagctggttagttggcggcaaaaaagaaagcccagcagagatggccgtattaatttaccaatttacaaaccatggcttaggggggcttcggaaagcgagccaaacgtagcaccgcttacttgtcggcggggcgaagcctgccggctgtgtagaaacgatttcgtttaatatatacagctcgatcggaagagctctgttcctgtcctgttttgcgcttcgtttcgggctacgttaagataggaaaagctcatgttgaaatgaggggacgttatgtttgaactattgcttttaatgctagagcgccttggcctcattgtcatgcttgcatttattgcgacgaggatgcgctttttccgtgtcatggttaaatcgactcggttaacgcgtaagcagacatggacggcgattttgttttttggcgcattcggcattattggcacttactctggcgtcacttttcaagcagaatcgcttgtgctgcagcggatcacatttggcattcaagaagatgccgcgattgcgaacttcagggtgattggcgttgtgttagccggactgtttggcggctataaagtcggtcttagcgccggtttaattgcaggcgtccatcggatgttgcttggcggcttcacggccttctcatgtgggatcgctacgattatcgccggcttatttgctgctttttaccgatcgaaaaatccgaatgcggttaaccggccgctgtctatctttcttctcggtgcattggcggaaaccgtgcaaatgggtttaattgctttgcttgcaaatccgacggctgctgcgatttcccttgtgcaaacgatcgggttgccaatgattgtggccaatgggattggctgtacgctctttttgctcattatccaaagcgtgacaaaagaagaacagaaagcaggcgctttgcaagcgcaaaagagcttgcgcattgccgaacaaacactggcccattttaagcatgggctatcaagccattctgctaaggaagtatgcgacattttatataaagaactgaatgcctgtgcgattgcaatgacaaatcaggatatgattcttgcccatattggcgttgcggctgaccaccataaaaccaacatgagcattcaaacgaaattaacggctgaagtgatcgcaaaaaagcaaatgattattgctggcgatgatgaaatccactgcaaagagccgaattgcccacttggcgcagccgtcatcgcccctttaattatccgggctgaagtggtaggcacacttaaattttattttcattcaaaaaaagaaattacggaattagagacggaaatgctttctggtttaaccaatttgcttagcagccagctagagttggctgaagccgaccgggcgtatcaacttgccaaagaagcagaaatcaatgcgctacaagcgcaaatcagcccccattttttatttaatacgttaaatacagtcatttccttgattcggatcgagccaatgaaagcaaggacgatgctccattcgttagcgcaatttttacggcaaaatgtctcggcgacgacgacaaagcttcattctcttgcagaagagctccaccatataaaggcttatttatcgattgaagaagtccgctttgaaggccggctaactgtccagtataagattgatgagcggtttttgcatgtatcgattccgccgctaacgttgcagccactcgttgagaacgcgatgaagcatggttttaaaaataaacgctctgattgtgtgctaatcatttctgtgcaagaacaaggggaagatgtcgttctttctgttcaagataacggggcagggtttgatcctgacaaactgaaaaaactaggaaatgaacttcctgccacagacagcggtacaggcattggcctctacaacagcaataaacgattgcaaatgatgtatggccctgaagcgtcattggcattttcagcccagcctggtcggggaacactcgtccgtttccgaattccaaaattggctagaaaggacagggagcaccatgaacatgaagaacaaaccgattcgcacgctggtcgctgacgatgaaaagtatagccgtgaggaattgctgtatttgcttggtttttttccacaaattgaagtggtaggcgaagcggcgtctggccacgaaacagcagcaaaaatgatggacttgcaaccggaccttttgtttttagatattgaaatgccggaaatggatggaacagaaattgcagcaatcgccaaacaaatgaagcaaccgccattcattgtatttgcgacagcctacccgcagtttgccgtagaagcctttcagctacaggcaaaaggctatttaatcaagcccattgatgaaacacggcttgccgaaacaattgcccaagtggaagatatgctggcgctcacagcagaacgggaacgaacaaagccacctgcaaaactagccgtcgagggggacgaggcgattcactttttggaaccagagtcgatcgcatacgcataccgtgatgagaaaagcaccaaagtcatcacagctacaggcgcctacgaaacacggctgacgttaaaagaactggagacgcggttggctccctattcgttttttcgagtccacaaaagctatttagtaaacactgcctgtattacagaaatgaacgcctggttcaatggggcttaccaattaaagctaaaaggcattgacgaccatattccagtaagccgcaactacgtgaaaccccttcgttcgcaaatcgaactttagggccaagctgcatcttggctctatttttttgcatgttaggccctctttttggcgccttatgccggattttacacaaacacgcgctttttttgtacactcagcttgtgaaaccgcattcacggtagtccgaaaaggaggacgattgcatgtatacatttttgggagcgcttgcactattaataattgggtatttcacttacggaagatttgtcgaaaaagtgttccagccaaaggcggaaaggacgacgcctgcctatacgaaacacgatggcgtcgactatttgccgatgggcaaaaagaaaaacgcattgattcagttgattagcattgctggggtagggccgatttttgggccgattatgggtgcgctttacgggcctgtcgccttcatctggatcgtactcggctgtatttttgcaggtgcagtccatgactatttgacagggatgatttcgattcgaaatggcggcgcccacttgcctgagctagcgggaaagtttctagggaaagcgatgaaacacgtggtcaacgcattctcgatcttgcttttgctgctcgtcggtaccgtctttgtcgcctcgccagctgacttgctttatgatctggtcaatggttctgtgccagttgttgtctttgttgtcctcatctttttctattttctattggcaacgatcctgccgatcaataaaatcattggcagcatttatccttatatcggtgccttgctgctgtttagcacggtaggaattggcttggcccttgtttggaaccaagcgccgattccagaattgtcccttgccaatacccatcccgagggagcggcaatttttccgctgttgttcttgacgatttcttgtggggcgctatctggtttccacgccacgcaatcgccaatcatttcgcggacgacacaaaatgaaagccaagggcgcaacattttttatgggatgatgattgcagagggcatgatagcgatgatttgggcagcggcagcaatgagtttatttgatggccctgtcacgcttaacgaattaatctccacgataggcacaggcggcattgtgtctgaaatttctacaatgatgctaggcccaattgttggcacactagcgattctcggcgtcattattttgccgattacatctggcgataccgcttttcggagtgcgcgaatgattattgccgattatatcaacgtgccgcaaaagaaagtgatgaaccgcatttggattgccgcgccattgttcattacgtctatcattttaacgacagtagacttcacaatgctgtggcagtactttaactgggcgaaccaatcgaccgccgtcatcgccctttggatcggcgccatgttcttatacattgcccgccgaaattactggattgcgatttttccagcctggtttatgagtgtgacggcagcgacctatatcgtcaatgcgccaatcggctttaacttgccaatgcaagcatccgttatcatcggcgtaggctttaccgtccttttgactgttttattttttaaagcagcccataaacgccggagcgaaaacctcccgattgaagaagatatttccgaatgggaaaacaaacaaagcgcgtaacaggaaagcctgcctaataactgggcgggctctttttcttggtgtaccgataactaggtaataccaaaccttcgttctacccattaactacttttaacatttgccgaatcgctcctagatgataggcggaatgggcgagggaagctaccatttcattggcctttcgttcattccattcggcatcgtccaccaattgcaaaagagttacgtattcatttcgcaatcctgcttgaatatgattccactgctgttcatctactgaatgaatggtccaactcttgccccaatccatttctggttgttttcctttttttaacgtttcattggttccccatagatagtagcgaatgtggtccgtgtgtgcagccaatgttgttccataaacggatcgggaagctaggtcgctcgacatcccttccagtacaccgaaaattcccgaattcggttcagcctctgtgaaccaacttccttttgcttccggtccttcaaatgtttcctttattaacgttttaaccgagtttcttactatttcgttcatgtttagccctccataaatgtttgttgtccatccaatcaactgccaacggaaaaccgactatggtcaggtcaaaaagtcgattggtaacacctcttttcatgttctgtccagtattgttcatagatgtgtataaccttctataattactttggtggttatattatcgattagttgcttctaactgtcaatagcttttataatggttataagaaaaattcaaatgttatttacggtcacacaaggagaagtcacatgtctgatataaataaagatgtacacgagcacgagttacttggcggacgtttgtgtttggattttgcgaatacagtaagctggcacgatagcagtgagaaatcacaggagttgctgacgagttatgaaagattagtgaactggagtttgcatgctaatattcttaacaaacggcaagcgctttcgctgctggaaaaagcagaaaatcaacctgctaaggcgaaagaagttctccaacaagcgattgagctgcgggaatcgatttaccatgtttttagtcttgtatcgatcaatgaaatgccagatgatcacgatctttctattttgaatgaggctttaggccatgcttacggaagaatgcaaatagtacctagtgggactacattttcattggaatttttaaacggtgaagacacattagatggtatgcttccgccgattgttaagtctgctatagacgtgctgacttctgaaaaagaacggagcagggtgaaaaagtgtgaaggggatccatgtggttggctgtttttagatacaagccgcaatcgcagcagacgttggtgttctatggcagactgcgggaatcgggccaaagcaaagcgattttatcataatagaaaataataacgcgtaactgactccacaaaggagtgcacgtttcctgaataccagaaaacgagcaacctatcaacaaaaagggtgaaggcaaatgaagaaggctaaaacaatcgaaaccaatgctagcgtcgctgaatttattgaacgtgttgaaagcccatcgaagcgggaggatgcatacaagcttcttgcgattttttcggaaacgacagggtatgaagcaaagatgtgggggccgagcattattggttttggttcataccattacgtgtacaaatctgggcatgaaggggatgcgccactcgttggtttttcaccgagaaaagcaaaaatcagtttgtatgttgcttgtgaggaaacgaaaaaacaacaactgcttaagaacttcggaaaacatacggctggaaaatcgtgcgtgtatattaataaagtggccgatattgatatagaagtattaaagtcgctaattaaagaaacagtccaatttttaagagcgacatatccagatggccaaaagtagtgaggattcggtaagtgggcccaataaagaacgcggcagccctacgcgctgatccattgcgcgatagactgccacatggcctccagtctgatagttcctaaagggctatggaatctcgatttcaaatggttcaaacgtaatattgtaaggttcgatggcgacttcttcgtgctcttccatgtgttcgcctgtttctcctatgcggtctggcgtgatgaggactggggtgacaaccacttttttgaccgatggacttagcggatcaaacattttcgtgccttggactgtccagaccccatctacaaaatctccactaatatcgccagaataagaagggatcgtattgccatcttggtcaacaagttcaaattccaaatcgtaaataggcaaggaaaggtctgttgaatcgccttcctgagaagcggaatacgttaagcttgttgaggtttggcttaaagacaacgactcgacgtcaagttcgattccttccgattgttgactagcatggacggcaatttgattgctatcaagctggtctaccgtttcggaaaaataatacgtatccccgttgccgttctctaaaatgagaccgaattcaaatgagtcagaatcaacctcttccgcctcaatttcataaatgtgtttttgttcaatcgcgctaatttgttgtatttcttcccttgctgaaaaccctgaagaaggcttgccgtttatgacgggttgtatggtgaaatcggaatctttttcagtaagcgcttcatctgatttaacggtaaatcctaaggagatacgagtttggtcatacaacagctcttctaatgtgacagctactccatgaatggtctgtgtttcatctaatccctttgtcaatccttgttcacttgcttgcttaagtcgctcatcttctgaaacgctaaagacagagcctattaccggaatttgtgaaaggctattggccaatgcaggagaaaagtaagctgagccaaaaagaagcgcgattgcagcggctgaagcgccaaagctgtaagcccacggtttccaacttgcctttttcgctttttctgccttcaaaattccttggcgaatggcatgctcgacttcttgtttgatctgtttatcaaatgatggttccatgcaaacgttcgctcctctcaaaataggctttcatccgttttctccctcgaagcaggtaggatttgatggttgattgtggttttttcataatgtcggcgacttctttgatagggaggtcgtggtaataatgcagaataatggccgactggtatttttgatcgagatcgagaagcgcggctgataacgttgaagcatgtgcgggtgcttcttgatggccttctaactttttaaatagatccgcgtcttcaaaggggatcattttcttttgtttttgcagcagttggtagcattcacgaatgagaatttttgtcacccacgtcatgaaatattgtggatggttcaatttgtgaatcgataagtatgctttgcagctagcctcttgaatggcatcaagagcatcattatgttggttggtgtatttcatggcggtatagtaaagcttttcataatgagccattaacaaagattcaaaagcggctacgttgccgctaattgcttttcgtgcgagctcttcgtctgtcataggccgtgcctcctttctactacttagagggcgttttgtgatcaaaaggttgcactttcaaaaagattttgtttgacagccagaaataagagagggcctacatgtttaaacaaagaaaaagcaccaagtccaaggatgagactttgacttggtgcttttgccttttagtgatcaacgagttctttttccataatatagtcatccatcacatagccattgccgatgtcggctatttgtgtgcgtactttttgaaagccttttttctcatagacagcgatggagtctttattatggcggttaacggtcagccacatttttgttaaaccgcgcttttggcagagtgtttctaaaaaggcaaatgcttggctggcatagccttttccgcggtggcttttttcgatgtaacatttgctaaggaagagtttcccttcttcttgctttgcgccgatatagcctattttttcgccgttagcgataagaaagtaatactcgtatccttgcttttcgatttgttcagttatagcttggaccgattgaaatttgtctagcatgtatgcaatttgttcatgtgaaatgatcgttacataatgttgttgccaaatgtctgcgcctaaacgtgctaactcgctaatatcgttgcttgtttgtacttgtttgatgtccacgatgatcgaaccatcctttgcggaataatgcttgtatagagctatattacctgatctattccctatttgaaatagacttgccttgccaaaaatggcccagcgacatggttaaatcgctgggctgcttttttattgctgcttgtcatcgatgtcaaactgttgcactaacccttggagctcttcggcaaattgggttaagttttctacagaagcagcgatttcttccattgaagcaagctgttcttctgtaaaggctgaaatgttttggacgctggcggacgacgtctctgagatggaagcgagatcgtcaaacgtggcgacgaatgtttcgcttccttggccgatgctgttaattaagctcgcgacttcatggacttccgcggccacgttatcgacgaaaattttaatgttgtggaatgattcgcccgcaacgttgacgacttcaatccctttttccacttgttctttgcttgtttccatttgtgcgaccgtttgttgggcatcttcttgtgttaattggatcatttcactaatctcaaccgtagcggcggctgactggtctgccagttttttaacttcgttggcgacgacggaaaagccgcggccatcttcgccagcgcgggcagcttcgatcgcagcattgagcgcaagcaaattcgtttggtcagcaatgcttttgatcgtatcggccactttgttaatttcgattgaacgttgcccgagcccctctactttttgtgataagtttcctactgtttccctaatctgcgtcatttgtgaaatacttgtgttaatcgccttgttgccgttttctacgaactgggctgcctcttgggctgtttgttgaacaccgtccgttttttcgactgcttcgttgatggaaccagccatttttttcgcaattcctgcactctcgtttacgctgacagcctgtttatcgactccggtggccacttcttgcatcgaattggcaatttgttcggtggcacgtgtgttttctccggagatggccatgacttcttcagcagaagcagacaattggtgggatttgtcttgaatatgggcaatcatggttgccagggcattgcgcattttttcaaatgacttgcctaatctgccgatttcatcgttttggtttttatcgactttaaaagttacggccaagtccccttcacccattttctcggctgctgtcgtgagtctctggataggggagacaatcgaccgtgtcaaaatgtaaacaaggacggcgccgcctagtaaagaaagaaaaatgacgaataaagtcgtatttaaaattggcgctactgcacgttcaatctctgtttcgtacatggcggagacaattttccagcctgtacggtcattcgttgtataatgaagtttgaggttttcatcatctgtttccgactggtaatctaattcgccttcttccgagtcatgcagctgtaagaaaaactcactcgcttcgcttcctaactcttcatgtggatgggaaacataagcgttattctggtcaataataaacacgtatccattttcaccgatggagattgttgatagtaaatcggttatggcgtctaactgcaaattaagggcagcgacgccgtgttcatctgctgttgttttagcgattgtgacaactggttcattggatgaattggaaatataaggggctgtgataatcgtttcccctgtttgttccatcgcttgctggtaccaagggcgttcccttgggtcatagtcaggagggttctgaaacgacgtcggttcgttcataaaatttcctgctgttgtccctacaaaggtttgctccacatgggtttttgtttcttgaaacgtctgcaacaaggtgcgctgctcttctgtttcttcttctaaaaatgcttctgcgtcgcttgcaagggcgacatattcaatgttttcgatttgcccttctataaataagtcgattgtgcgattaatgatttgtaaactttcttgatttgcctcgctcatgctcgaaatgatattgcccttcgcactttggtatgagcttatgccaataatggcacttggaatggctagcacaatggcaaaggctgtaatgagctttgcttttaaaggccaatgcttaagcgtcgtccatttgtttttcacgttttttgctccccttctattgttttccccttacgtttaaaaattcaacactgttattatcgtcatccgttaccaatttttaaagggttacagcagttgcatatcgaaacagataacctattttagcgtgtttagagcaagtgaatttttatcgcatggttacaacaacatacttcgtttatggggatgggacataaggcaatcggtaaataggcgctggctatggataggagtcttttgtttgcagagttcgtgttgtccgaggactaaaggaaaatagacgtggcatcttcctcttttagattcaaaaactcccctaagataaaccttaaggggaggcggaaatcgttaagagtcttggcttttggcaccgctttgctggctttcaataaatgtccaaacgtctttaggcaaaggaatcccttctttttgtctagtttcataggtgttcgcttctggatcgcctggggcaagcacttgtgagaacccgtcagctggcggcacttggcggagttcgcgaaccatttggtcgatttgtgtaggaaaagaaacagcaggggcaaaagcttctgtgtcaatcgcgataaagaaatggcctaaacgccggtactggtcataatcgccatacattttcgtaacgtgtggaccgaacgctgaggcagtcaataacgcagaaaaaatttcaacaaccatggcgagcccgtatcctttagcgccgccaaatggcaataaatatgcgacttcattcggattggttgtcgttttcccctctttgtcaacgccccagtttgggggaatcgagttgccacctgcctgggcatttaaaattttgccaaatgcggcttcgcttgtcgcaaaatctaaaataaccggcttttcagcctcagcagggaagccaaaagcaatcgggttggtgccaaagaagggcgctttccctccaaaagggacaacggctttgtcggtttgcgacatcgcgatcccaatgacattgctgtgtgcggcttgttggacaaagtaggacaatgcgccacagtggctgctgttttgtacagcgacagcgccgatgccgttgtttttcgcaagctggatggcatggtccatcgcctttttagaagctgggtgcccgagcccatggtccgcgtcgtaaacagctgttgacggggttatttgcttgatcgctggctgtgggtcggtctttaagccgccagcggcaattcgctttaaatagtgttcgacacgcataacaccgtgtgaatcgacaccgcgcaaatttgcatggacaagcacatcagcggcaatgtgggcgtcttcctcgttcacattcgcgttgataaaggcattggcaaccgcatattgcaactgtttggtttgaatacgaatggccataaaaactcctccttcatgaaagcgttttacattctgctgatttcatactaccatatttgtatggtagtatggtagtgtattagttgaagaagaaagaggaggtgaatccatggatcgatttgtcagaaagcggtattcgacaaccgattttgtctatgaaacgattaaagaacaaattatgacgctcgtccttcccccgggttccacgatttcggaaaaggatattgcggaagaactggaagtaagccggacgcctgtacgtgaatcatttttaaggctatcggaagatgatttgctcgatattcgcccacaacgtggctcgtttgtgacaaaaattgatctttcccatgtggaagacgcccgttttctgcgggaacacatggaagtagctacgattcggttagcctgtgaagctgcgactgaaaaagcattgcttttattggatgagaatgtcggtaaacaaaaacaggcaaaagagcgtgaagatgaagaggaactgtttgcattagaccgcgaatttcatcgtctcatttcagctggtgcggggaaattgcggatttgggaagttgtacaaaaaatgaacacgcacttaaatagagcgctgaagctaagcatccattcaaaactaaattggcatttattgatccagcaccatgaggaaatggtgcaagcgatacgcgcgaaacaagcagatgaggctgaagcgcttgtccgtgaccacctaaaattaattacgtatgaccaatacgagctaaaggaagcctatccaacttattttgaagaggaatgacatatgaacaaacgtggagtccgcttgtgcttgctcggtctttgaaaaaggattggaggccgggcaagtcggcacgcaattcgtaggaatgtctgttcaacaagagtaatgaggagggacaacggtgaaaaaaacagtcggcgttctttttgcagccttggcactcgccttaagcggatgcacaacgacagcggtgagcggggacgaaggagaagttacacgctggaaaatgacccatatttccgactcgagccatttatggcataaaactgctgaggaatttgccaggcttgtcgaagaaaaaacgaatggaaatgtcatcatcgatatttatccgaatagtcagttgggcaatgaagtggacaacattaattcgatccgctttggcgcgaccgatttgacgattaccggagaaacattggaagtgtggacgccaaacgctattttgttagcggttccatatgcatttgaagaccaagaccatatggagcgtgtgattgagggcgagattggtaaaaagatcgagcaagatattcaggaagacatcggtttaacgccattgttttatatgcaacgggcgccacggaacttgacgtcgaatgacccgatttcgactccagaagagttgcgtgggtttagcatgcgtgtgccaaacgtgccgctgttccttgacgcttgggctgaagccggggcaagcccgcaagttattagtttgaatgaagtctttactggtttacagcaaggtgtaattgaaggccaagaaaatccaaatgatttaattgatagcaatggcttttatgaagtccaacaatatttaaatttgacggagcatgtccgctcctggatttatgtcgtagtcggtaccgagcaattgaaagcgttgccagaagacgagcaggctgctgtgttggaagcggcagaggaagcggaggcgtatgcccagagcttattggaggaagaaacggaattggttttggagcgccttttatcgcgagggatgacattgaatgaagaagttgaccaagacgctttccgcgaggcgatgttgcctgctttaaaacaaaacttaggaaaagaacagtatgagctttatctgcaaatggtagcagagggagaggaaggaggcagcgaatgaaggcgatttcgattcttgataagctattggcttgggcgacattattgttatttacggcccttcttgctgtagtagtgattcaaattttgggccgttaccttccgtacaacgctatttggaccgaggaattatcgcgatacttgtttgtgtacgctattacgaccgctgctccattagcattgcgcaagaacgagtttatccgtgtcgatatggtcttagcgccattaaaagaaaagacaaaacgcctttatgaaagcattattttagggcttgtctttgcttttagtgtcgttttgttcgtcgaagggattcgcttttatcagctcggccttgattttatcgcgccaacaatgggtttttcgatgagttatgtgtatgctgctgtccctttattggcatttttaatcatggtgtattcgcttgtttcgattgtagaccggacgaggccgttggaaaaggaggggaatgaagaatgatgtcgttattattagtcgggttgttcttattttttattatggcagggattccaattgcgtttagccttggcctgtcttcgttgatttatttgcttatcgccggcattcctttgacgatcattccccaaacgatgctgtccgggatcaattcatttgtgttgctcgccattccagcctttattcttgctggaaatttaatgaacgcaggaggaatcaccacaaggatcattgattttgccaatgccgttgttggccacatccgcggcgggctggcgttaacgaatgtcgcttcttcacttgggtttgcgggcatttcaggtacggcattgtccgacacagccagcattggctcagtaatgattccggcgatgaaaaagcaagggtatggcgccggtttttccgctgcggttacgtcgatttcctcaactgttggcccgatgcttcccccatctttgccaatgatcattattggtactctcgccagcgtctcgattggcgatttgtttcttgctggtgctattcctggcattctattggcgatcggctttttagtcgttacgtatatcatttctgtgaagcgcggttatccaaagggagaacggcagccgtttaaaacagtcgtcacgtcattttttggcgccttctgggcgttgtttatggtctttatcattttatggggcattcttggcggctattttacgccaacagaagcagcggtcgtttgtgtgctgtacgcattggtcgtcggcggttttgtttatcgcgagcttaactttaaagaagtgccagggctgcttgtcagcacactgcgatcgacgtcttcgattttgttgcttgttggtttcgccaatctatttggctggattttggtatcggaaggtgtgcctgtattaatcgcaaatgggattttgtcgattacagaaaacccgattcttgtcattctccttatcattcttttattgcttgtgatcggcatgtttatggaaacgattgcagctcttgtcatcttattccctgtcttattgcctgtcgctacaagcgtcgggatggatcctgtccattttggcgtagtgatggtattgacattgatgattggtttgtctactccgccagtaggcgtctgtttgtttgtggcttctagctttgcgaaagtgccaatcggcaaaacggttaaagaactggtgccatactttgcaattgccatcgtcgtcttgctggttgtcgcctatattcctcaactatctttattcttgcctagtttgtttgaatgaccgaaacggctaagaccctgtgccacttggtacagggtcttctactttttagcaatcacttgctacgtcgttgtttcctttagtccggcttttgaccgcagtactgttgttgtggcctcataatccggttgtcttggctttgttcgatgacatggctgcaccatccgacgacgcggcttacacaaaatgtcggtgtgaaccattcgggtttaaggcgaagtgcttccatgattgcagcagcgtaatattcaacgttcgcatgaagctggcggcctggcttgtattccgctaaaagctgcgttgctagttgctcaatcgccactgcttcgcttaaaaatgtctcttggttattgaggctttttaacacctcacgcaatgcgttggcgcgagggtcggtcgttttataaacacggtggccaaagcccattaaacgctcgccgcgttcgagcttttcccgcagcaacgtttcgctgcttgtgtcagccgtttggatatcactgaacagctcaagtacaccagtgggcgcgccgccgtgcaaccttccttttaacgcgccaagcgctccacaaatagccgaacgaagatccgcttctgtagaggcaatcacccgcgccgcaaacgttgacgcattcatgccgtgttccgctgtcaatattaaataagcgcttaaagcacgaatgtgggcggcatgtggcttttcgccagtaagcatatacaagtaattagcaacgtggttgagcgatgggtctggttcaatcgcgtctttgccgcagctcctattggcccacgcagccacaatcgttggaacgatcgcgactaagcgcatcgcttcttgttgttgcgggggccaaccttccttgccagtgtagctagaaatcaaagttcgtaatgcgtccatcatactaaggtctttcggcaaagcagcgagcagctttttcaaatcgtctggcaaaggacgcatcgttttcaaggcagtggaaaaatcgtctttttctgcttccgttggcctttttccgttcaacagcaagtaagcaacgttttcaaagtcagcagatttcgcaagttcttctgcttgataccctcggtaaagcaatgttccttgttcgccatcgattgcactaatcgtcgtttttgcgacgacgacattctccaacccttttgcatacaacatatttccatcccccaaaaattcattttctttatcatagcgccatggtaatctaaatgaaattaaattatttccgcattattgattaagatatttaatcagtggagggcgaaaatgaatatacactggattgaaagctttcttgccgcagccaaatatgaaaacttccgtaaagcagctgcctatttatacgtttcccaaccgactgtcactgtccatattcaccagcttgagaaagcgctaggcgtgcctttgtttaaacggactggaaggcaagtcgtgttgactgcttacggcaagtcgtaccttccttatgcacggaacatctatgacgcataccatgaaggcgtttcctttatcagcaaaaaacggcaagggtatgaaagcacgctaaaaatcgctgtctcgccgttggttgcttccagttatttgccttactgggtcaaagcatttgtgaaaaaacaagcagcaacggaagtggtagtcgacgtggttgagtcagccgcgatcggccaaatggtggaatcagggcgtgccgatgttggcttatcaagaatgcctgttgaacagacagggagcgagtgtgcgcgcctgcaaacagaaaagctcctctttgtcgttccccatgacggccgtgatgccgagaatggcccacctattcattatgaagaggcgctagctgagatggtgcttttaagcggcaaccatcctgtctattgggaagatgtgttgcttgcgtgcaggcggattgtgcctggcctgaaggaaatgcacgtttcgcaagtgcatgtcacaaagcggtttattgaggaaggtctcggctgttccatattgccggaatcagcggtgcggcgggaattggcagagggccgcatgctagaagcagaaacggctggcctccctttgccaaccgtttctacttacatggtgacaaaatcgccttcagccgaagcagaagcatttgtgaagctggtcaaatcattggcttaatgtttgaagcttctcggtgagagatccttgacggttcagggtctcttatatcgtcgtgccttttaacatatttttcgtaatgttctatttatcgaaatgtcttgaattcaatttgtaatgttgtatacttgtaatacaactcataaaagcgctttcattgtgaggaggaaaaacgaagccatgaaaaagcgactgttattgttattattcgtatgttctttcattacgctcgcttcctgtaacaacaaagattatcagtatttttcaattgcaaccgcttccacgggtgggacgtattatccaattggtgtgggcatggggaatctttggacggaagaactaatggaccaagggatccgggcaacggggcagtcttctgctggatcagtcgaaaatattgacttgttacagaagggagaagcacaacttgcgattttacaaggattaattggcgatcaagcattcaacggaacaggaatctatgaaggccgggcctatgaagacttgcgttcgatcacatttctttggccgaatgtagaacactttgttttgcaaaacagccaaatcgaaacgggaacgattgccgatattgaagggaaaagcttctctgtagggccacaggcaagtggaacagaacagtcaacgttggcgattatgcgtggtattgacctgacaacggctgacattcagccagaataccttggctacgatgataccatttcggcgatgcgtgatggacgattacatggaggttctttgccggccggtgtgcctgttacggcgattacagatatgtatgccagtggcgtgcgtgccgatgtccttgatgtttccgatgaacaacttgaatcaattaatcagtctgccaatgtgttttttcgctatatcattcctgctggcacctatccgagaaaagaggaagatattcataccattgcacagtcgaactttcttgccacggataaagagcaagatgaagagatggtttacttgttaacgaaaacattgtacgaaaaccttgattttatgtatgaggttcatagttcagctcgggaaatgtcattagataccgcgttaaatggcatgtctgtcccccttcatccaggtgcttataagtattatcaagaacaaggcgtcgacatccccgacgaattacggccacctgaatgattggtatctaaccgagcaagatcattttcttacataaaggaggaggtcatatgagtgtgaagcagccaaacgtggatatagaccaaaacaatgaagaagtccaagagtctgttagtataggccgggccttaaaaggcaaacagcagaaaatcgttgcctttacaggcattcttttatcggggtttgctgtttatgtcaatagtttcatcaatatgcaggaaatttaccgcaacgttctctttcttgcattgctttttgttttagcgtttttgctttatccagcaacaaaaaagggagcaaacaaccggtttacaacagtggatatcatcttaaccattgctagtatcgctgggtctgtttatattttgttattttatacgacgattcacgtggaccggatgtcgcaggcggttacaatggactatatctttgctgggatcaccgttgttttgctgttggaggcggcaagacggacgctcggtctcttcattccgcttttaacgagtttagcgatcatttatgcggtatttggtccatactttccagggatttttggacacgcggggttttcctttgagcggctcttgtatcgggtttacatgacgacagaaggcatttacgggctcactctttccatcgcatctacgtatattgtcatcttcattttatttggagcgtttttaagtgtaagtggagcgtcaaagctttttaacgatttagcgattgcgatagcagggcaacggcggggaggccctgcacaagttgctgttctctctagtgctctaacaggctcattgaatggaagcgcagttgccaatgttgcgacaacaggggcatttacaattccattaatgaaacaaattggcttaaagccaagatatgcggcagcggttgaagcgaccgcttccacaggcgggatgatgatgccgccgattatgggggctgctgcctttattatggccgggtttttaggtgtttcctattctgttattgtgttagcggcaattattccaacgtttctttatttcgttgcccttgtgcttgcaattgacttagaagcgaaaaagcatggcttaaaaggaatgagcaaagactcgattccccaagtgtggcaagtaatgaaagagcgcggtgtcttgttattgccgattatcattgtaatctcgacattgttaatgggctatacaccactattcgctggttttgctggaattatatcggtcattattgctagttggcttacaaaagataaagaaacaagagtgacatttgcaaaaatagggactgcgtttattgacggagcgaaaagtacgattcaagtagggattgcgtgtgcgtcgatcggaattattattgctgttgtgacgatgtctggacttggttctgcgattgcctacaatgttctttcgatttctagtggcatgctttgggttgcgcttttgctcgtcatgattacttgcattgtcttgagtatggggcttccatcgactgctctttacatcgttgttgccgtaaccgcagctccagcattagttgaagcaggggtaaacccaattgccgctcatttctttgtcttctggtttggggccttgtccaacataactccgcctgtggctttggcgtcctatactgctgccggcattgccagagcagatgcaatgaaaacgtcgtggacgtctgtgaggctagcattgcccggctttattattccgtttatgattgcctacaatccgacgatggtaatgcagcctgaaagcgggtccgtgcaagtcgtagcagttgccatcaccattattacctctgtcttaggtgtgtttgcattggccgttgccctcacaaactatttctcgacagatttagtcgtgttggagcgcctgttgttttttgcaagttcccttctccttgtgagttcaggattgctaacgaatgcccttggcgttttcatcatggccgtcacgttaacgttacacattcttcgtgtcaaaaagaaaaaaagtgcaacagagaaccagttagcccaaggcgggtaaacaatggtaaaggtaaacagcaagagaaaagatcgttcgagtcatagcaaaacgtatctctctccgttaaaatgagcgtatacatcagatgtgacaaggtctctcaactctatgagggccttcagaaaagggtgaacgaagcttgcaagctccttccccttttcagcaaaaaggagagtgtgttgacggtgcgtttaccgattgagcgtaaaaaggtgtcaagccaagtactagaacagctaaaagaaatgattaaaaacggtgaatttccggctcatagtaagctcccgtctgaaatggagcttgcagaactctttggtgtcagtcgttcccccatccgtgaggcgttaagtgttttagaagcaagcggcttaatcgagtcaaaacaaggtggcggcagttgggtcaaagaagttcaattaacgaatttgttagagcaagtgacattggatatagtcgatatcggccaagtctatgatttgctcgaactccgaagcattattgaaacagaggcagcagcgttagcggctgttcgctatcaaaagcaagatattttagaattagagcttgcccttgctcaatttgcaaaaacagtggaggatcgagaggttgtcggagatgaagccgattacatgttccatcgtgtcattataaaagcttcttacaatccgtttttagagcaaacgatggcaaatgtatcagagctgctgcagaaggcattggccttttcactaaaaaagaaccgcttgcaacaaaaacgtgaagaagtgtaccgagaacatttaacgatttttaacgccatttatgagcgcgattcagaggcggcaagaaaagcaatgaatacacacttgcaaaacgttcgccgcaaactaggcgataaccgggtattgcctaattgagggggtaactgcaaagaagagcagccctcttcttttttacagtagtggactgtccacagcccagttggacgattaggaggagaggcatgaaaattacgccgattcgtaaacgtaaacgtgtctatcaggaaattattgagcaaatcaaaactgctgtcgctacaggcgaggttcaacctggcgataagcttccatctgaacgggcactatcagagatgttatccgtttccagaacatcggtgaaggaagcgttaaccgtattaaaagcgtcaggcgtgattcacattaaaccgggagtgggcgccttcctcgttcaggatagcccacagcgattgcaggttaagttggcggatttattacaggagaaagaaacagcgcttgtcgaattgattgagcttcgtcaagcgattgaaggggatgctgcctattatgcagcaaagcgaatcacaagcaggcaaaaggaaaatttacaaaccgtatttgagaggcttgtggccatcgaagagcaaggaaccgtcgccgtggaggaagattaccaatttcatttagcaattattgaagcggcaaacaacccattaatgcgtgatgtcatgaatttaatttccgataacatgctgggtgtcttagctaaaaatcaagaggcgtcagaaagaaatgaacgcttccaaggcgaaattgccgaggagcaccgcaacatttacgaagcgatcataaacggaaaaccacaggaggcaagaaaagcgatgtggcagcattttcaaggggtgaagcagcgtcacgtaaaagagagggggagcatggttgacgattgagcgttttttaaaagacatcagacaaataataaaagcagagaaccggattttaacggaaatcgccgatcgcagtagttatggctatgatgcgtcgttcggctaccacttacctgatcttgtgatccagccaactgccgctgaagaagtagctgcagtcatgaagttagccaatcagtacttcatacccgtctatccaagggggcaagggacaagtttaagcggcggcccacttccagttaaaggaggggttgtgctcgatttatcccagtggaacgacaagctggagattgacaaagaagacatggtggccattgtttctcctggagtgatcacagcaaaaatcgatgcggccgcaagggagattggttttatgtacccgcctgacccaagtagttctcatgtatcaaccattggcggaaatcttgctgaaaatgcaggagggcctagaggattgaagtatggcgtcacgaaagattatgttctcggcttagaagtagtaacaccagaaggagaaatcattcgtacagggggaagaacggttaaaaacgtgaccggttatgacttaacaaagctcattgtcggttcagaagggacgcttgggatcatcaccgaagcaacactccgcctcgttcctaaaccaccagccagccaaactgccatggcgctttttgaagacatggtcgattcaggacgggcgatttctaaagtgttaacggcaggcattgttcccgccaaaatggagctgatggaccaactgtccatccaggcagtcgaggcatacgaaccacgtggtttgccaaccgatgtgggggcattgttgttaatcgagctagatgggcaccctgtatcgatcgctgaagagatgacaaaagtcaaggaactgtgcaaaagcgtaggagcgagaacggttcaagtggcagagaatgaaaaagaagcggcggaattttggcaggcgcggaagctcgtttctccagcgattgttcgagtgaagccaacgaaaatttccgaggatgccaccgtcccccggagtaaaataccagaaatgtttcagcggttgaaggaaattcgcgaaacgtatcaaatcgaccttgtcgtgtttggccatgcgggcgatgggaatttacacccgaatatcattgctgatgctcgtgatcacgaggaaatggaacgagtcgaaaaagcagtggctgacattttcacagcagcggttgaacttgggggaaccctttcaggcgagcatgggattgggacgatgaaagccccattcatggaaatggaactaggaaaagctggactagacatgatgaagcggatcaaaacaagctgggatccgaacaacatcttaaatccaggaaagatattcccagagcctggacaaaggctggtgttgcgccatgactaaaccggaacggctgttagcctatcaagagacatttgactgtgtgcagtgcggttactgccttccatcctgcccaacgtacttaagcatggaaaaggaaacccattccccaaggggaaggattcatttagtgcaaatggcggcagagggaaagctgccgttatccgagattgaagagcaaatcgatctttgcctcggttgccgtgcctgtgaaacagtctgtccaaccaatgtacagtatggaaaaatacttgattcagcaaaggttgctttaaaggaagagcggaaaacaacagccccttggcatcagaaaatgatgaaaaaagcgatgtttgaaacggtgttgccaaatgacagggtcttacatgcgattggaacgggcctttccctctaccaaaaaagcggagtggcccgtatcgctcgaaaagccaagctaacacggatgttgccgaagtctcttgctgcattcgaggcagtgacgccagcggttgcttctcgaagggaaaggaaaaaccgtctggtcgatgccaaatcggaaggcaacacagcgcttcgtgttggtttttttaaaggctgtttgatggatacgatgttctcccacattaatgatttaacgattcagcttctccaacgtgctggctgtgaagtcgtggtaattgaaggtcaaacctgttgtggcgctttgcaaaaccatagcggtgaaagagacgtggcgaagcgcttggctaagcaaaacattgaggcgtttgaacaatacgactgcgattacatggtgaacagtattggcggctgcggggccatgcttgtagaatacgatgaccttttagcagatgagcctgaatggagagaacgggcgtctcgctttgctgaaaaaaacgtcgacagcagtgtgattttttcccagctttcgcttccatttgtaaagaaattgaacggtatagcaacataccaaccgtcctgccatatggcaaatgttcaaaagcgcatagaagaaccggtaaagctgcttcaatcgattccagggatgacgtatgtaccgatgaaggagagcgagctttgctgtgggtcggcagggatctataatcttgttcattatgagcaatcgatgaagattcttgatcggaaaatggaaaacgtaaaagccgttcagcctgaaatcatcgtaacgacaaaccctggctgtcatttgcaaatgaagctcggtgtagagcgggaaggacgttcggaacatataaaggtggttcatttaattgaactgttagcagaagcgtgtgatgtagggggaggcaaaagaaatgtatgattttaccatcattggcggtgggattgtcgggttagctgtcgggcacgccctatttggccgttatccaaaggcaagtgtattaatcattgaaaaagagcaggaagtcgccgctcatcaaacagggcataatagtggtgtcatccattcagggatttattataagccaggcagctttaaagcgaagtttgcaaaagcaggtaaccaatcaatgacggccttttgccaaaaacatggccttaaagtagacatttgcggaaaggtcattgtcgctacaaataagaaagaactgccactgcttgatcacctctaccaacgagggattgacaatggcctcgatcttcgaatgttatcgaaggaggaattacatgaggccgaaccgtatgtgaacggccttgccgccatatctgtacccacagccggaatcgtcagttacaaggaggttgccgaaaaactcgctagtttaatcgctgaaaaaggtggagaaattcaactaggtacgacggttgagactatttccgagagcaatgaaggagctacgattgaaacagataaagggacgtttcagacgagctacctcattaattgcgcaggcttgcatagtgaccgaatcgccaaacttgcaggctaccatgtggacatgaagatcgttcccttccggggagagtactataagcttaggccagaaaaacggcatcttgtgaaaaatttaatctatcccgttcctaatcccgattttccattccttggtgtccatttcacccggatgattgacggagaagtagatgcagggccaaatgcggttttaagctttaagcgggaaggctataggaaaaccgatatcgattggcaagatgtagcggaggtcattcgctacaaaggcttttggcagttagcgactaaatactggaaggaagggacggaagaaatgattcgttcgttcagcaaaaagaaatttgtggaaaaccttcagcatttgattcctgatgtcaccgaggccgatcttgttccaggaccgagcggtgttcgggctcaagcattaacgacagacggaaagctcgtagatgactttcaattaatccgtggccgaaaaagcctgcatgtttgcaacgctccgtcccctgcagctacagcttcccttgaaatcggcaaagcgatcgtggagaaggttgcccagtataaatgaaacgcaggagccgatgctatttattggctcctacgcttagagcaacgctttcttttcctgcaacaatgggcgaatcaagaatgcaatacgcaaacgcaacgtttcatcaggcttttttaaatcacagccaaggagttcctcacattttttgatgcggtaaatgacggtgttgcgatggatcgccatgacttttgcggtttccgccacttggcaattatgattgatatagatggacagtgtgcgggctagttccgcttggtcgggagattccggtgttgctaaggtttgcaaggcggtttggcaaaaggcagtaagcttctcagacggaatcaattgcagcatgtcagccagctcttgggcgcggtgcgttttgatgaagctttgcaaatgttctcggtagccagattgaagggcagccgtcgcttccttgtataagcttgccgcttcacttaagctgccgaagctggagatgccaaacgatacgccagagcggaagagtgcctgtatgtcttgttgaacggtatctacttccgcaagcaactttgcttcttcgttgcttgaacggtcactttcaataacgacaacatacacatcattcttccaaaacacatgactagttggataccgttcgcgaaacagccgtacaaggaggctatacaggtcttcatgttgctcaagcgcttcttcgttagtcagcaactcgctagtgttatctaagtgggcagcaatgaatacatagtccttgttgacagagaaaggatacgattcgtcgtgctccatttcgaaagggcggcgcccttcgactaagtcggaaaaaaaactattttgggcaaggcgggcttgttgctctgctgcatgaagcttcatcagttcaaacgacagaacgttagctgcttgttcaatggcaagcgcaaacgggcaatcgctttttgacgctgagccgagcacaattaagtacccttttcgtgcacaggcggttcgaatcggaaagacagcgcacggattctcgttctcctcctgtaggatggatagctgcaacgtcggcagctgtttgcttggaatcaactcccgtaggcgccagtatttttcaaaaaaggagtcattcgtgacaggatcggaagacgcgatcatgtccaattgatcatttaacagcaatgcgggcacattgagcatagaggccaattgtacgacaacagatgtgccatttccgcctgacacaatcacatcggcaaagcggcggtggatctccaacgcttgatggagctctgtcgtctgccctgttaaaagaaactgcgtcaactgatggacgaattcgctaaaatgaatcgtatccggtagttcaaacagaggcagatgaaggcggttgcatgcgtcgataacaacggcagggatcgctttctctagtcgtttagtttgcaccaccaagcctgcacacttttgctttgatagttcctggacaaaggcaaccagggaatacggatgcccttttttaaaagtagcagcaagcagcaattgatggggttccatgttaacacctggatcaaaggaatgaatcatattagcagaacgaagcggcttatcgaggccacgtttgcctgcgagcagacgggcctttgcaaaggcaggcagtgccaacaagtctttcatttgcatgtatatcaccttattagaaatagatggtagaggctatgttaagtatacggttcagcggcagtttggaggaaaagtacgtaaagaaatgtaacaggaattatgaaaatcgcttgtttctgatctctcaaacattcgattccatggccaacaatcttgttgaaacgaggaaaagttaataaatggattgtcagagaatctgacaaaaaccatggatcgtttacgaacatgtgctaatatactcctattaaaaaataaacatagcctttcagggttccgccatacattgggacaggtccgggaaggcggcatcaattgatgtttgaactgggaggaaaagtccggtgaaggccatgacgtggtcttcatcggactttttttaaggatatgttcagcagacatggagggaaaatacgtggcaggaaaaatcgtcgaatctgatttcgaatggcaggcggttccgcaagagcggcggcgtggtttttggcaaatgtttgtgttaatggtaggcttcacatttttttcggcaagtatgttggcgggaggcacgcttgggcaaggcttgtcttttagtcggtttatcattactgttttagtaggcaattttattcttggcgtatatacaggggcacttgcctacatcgcagcaaagacagggttatctacccatttgttgacacggtttgcgtttggtgaaaaaggctcctatttgccttccctgcttctaagcgttacgcaaattggctggttcggcgtagggttaatgatgcttgccgtgcccgtgcaaaaagtaacaggtgttgacttatggctgcttctccttttaggcggcgtcctgatgacagcaactgcctatttaggtgtaaaggcattgacgatgttaagctttatcgccgtaccagcgatcgcggtattagggacaatctctagttccattgctgtcaatgatatgggcggcccgactcaattgtttgcttatcagccaacggaaggaatcggcatcgcagctgccttatcggtttgtattggctcctttataagtggcggcacgttgacacctgattttgcccgttatggctcaagcaaaaaagtcgcggtgtcgacgacagtgattgccttctttttaggcaactcgttaatgtttttgttcggtgcagttggcgcaatatccactggttttgctgaaatttcagaagtcatgtttacacaagggctgatttggccggcgatttttgcgctcggtttaaacatttggacgaccaatgacagcgccttgtatgcttcagggctagggctttccaatgtcacgaagttttcgaagaaaaagctagtcttggttaatgggttagtcggcacgctgcttgcttattggctgtatacgaattttgtcagctggctagattttttaaatttaacgttgccgccaataggcgcgattgtgctagtcgattattttataatcaaaaaaggcacttacgctcctttcaagcaagcttcgtttaaagctgtgcgcgcaaatgcgttaatggcgtggctcattggcttggcaggggcgctgtttgtacctggcatccagccccttaacgccctgatttttgcagcactctcctatatatgtttggagaaaattgtaaatagaaaaggagaacaactctgatgataattaaacaggctgctttgcgcggcaaagatggtttatgggatatttggctgaaagacggaaagatcgctaaaattgctcaaaatattgaagcagaaggggaacaaatcatcgaagcagatggaaacctagtcatccccccttttattgaaccgcacatccatttagactcgacgctaacggcaggagatccaaattggaatttatcaggtacgttatttgaaggcatccagcgttggtctgaacgcaaagaaaaactaacacacgaagatgtcaaagaacgggcgacaaaagcgctcaaatggcaaattagccaagggattcaacatgtgcgcacacatgtcgatacaaccgatccacatttgacggcgctcaaagcactccttgaagtaaaggaagaaatgaaaccatttgttgatatccagctggtcgctttcccacaagaaggcattctatcttatccgcaagggcaggagctgctggaagaagcactaaaactgggcgccgatgtcgttggcgggattccccattatgaatttacaagggaaatgggcgtaaaatcagttgaggttgcctttaaactagccgagaaatatgacaaactccttgatttccattgcgatgaaacagacgatgagcaatcgcgttttatcgaaaatgtagcggcgcttgcttaccaaagcggaatgaaagagcgggtcacggcatcccatacgacggcgatgcattcgtacaatggcccatatgtcagcaaattgcttcgtgtttgccagctggctgagctcaattttatcgccaacccacttgtcaatacgcacttgcaagggcggtttgaccaccatcctgtccgccgcggcatcacgcgagtcaaacaattgcatgaggcagggctaaatgtttgtttcggccatgatgacatctttgacccgtggtatccccttggcacaggcaacatgctgcaagtgctatttatgggacttcatgtaagccatctaacgggctatgagcaaattagccagtcccttgatttcattaccgaaaatagcgccaaaacgttgcacattacagacgaatacggcattgaagaaggaaagccggcaaacgtaatccttgtcgatgaaaaagacgagttcaacttgatccgtcgccaagcgcctgtgcttgcctccatcagaaacgggaagattatcgccaagaccgccccggcccaaacgactgtccatttgcatgaagaagagcaagtacggttttctttgtgagtcacatagcgagctgtatcgttagtatgacaaaaactttataattggtaaaaagggtttatcgccctctgtggaaaatatagtaacgtcttataaaagatgcttttgactcagatgagtcttttataaggcgactatatttagagaagattgactgaattgagggaattcttagtatccttgtggtgatctctttgttagcaagtagatgcactatgttaacctgacattaagtatatgttggagcggggcagtcatacacgtctacgcgtgctcaagctagagttcatatgcaatggaactttattcacaaagggctaggtagcacgtatggcgctggagaacttggtgtgtggggaaatcaaaagaatcaggctggaggttggttttatgcagactaataaacaaagagcatctttaaaaatgggacagaaaattatttatttttttgttcttcctattgtagccttagcggcagtcttaggtattttaggagcagtcactttcaatttatttaagtgaaaaggaggtgagcttacctcagcttgttgacaagtgttaagatggtcgacaggcttttttatatgtaggaagggagactacggcacgaatggcataactcgtcatgagctatgccattctgtttttttacttgtctacttggccgcatttgttggcgtcgacagaatgaaggaacaaaaagcactcgccttcaacgtggagctcttcgctttgcaatgggctttcgcaaatgacatcgacaaatgcaaggctctttagtgaatcagggagtttgaccgttgcttcttgtttactgcggttaaccgcaaataaaagaagctctccgccagcggatgtggaatacaacagcacatcctcagtgccagagtcataaaattttaaggtgttataggtgcccattgcttggtgagttttgcggatcttaattagtttttgcagaaattggaatagctcctgatcttgttggtcttcctcccacaccatgcacgcgcggcaaccagggtcattttctccggccatgccgatttcatccccgtaataaatacaaggtgagccaggaaaggaaaacagcaataagtaggaaagtttgactaattttttgttgcccccacttacagttaaaattcttggtgtgtcatggctgccgagcaaattgaactggacttcgttcaccaattttgggtaactgtacaaatgttttgtgaccgcgtattgaaaagtggttgcgcttttgccgtgttggacaaagtcaaaaatcgcgtcagtgagcgggtagttcatgaccccatcgaattggtcgccttgcagccaagggtaagcgttatgccatatttcaccgagaatatacaaatctggttttaatgctttgactctgttgcgaaactcacgccagaaggcatggtcgacttcattggcgacatctaaacgccaaccgtcaatgtcaaactccttaatccaatacgtagctacgttcaataaatagtcctttactgcttcatttgctgtatttagtttcggcattaaaggcgtgaaggcgaacgtatcgtaattaggtggttcctctgctcgaacaggaaattggcggatatgaaaccaatccctatattctgattcctgctggtgttttagtacatcttgaaaaggtggaaaatacaggcctgcatggttgaagacggcatcaagcatgacacgaatgccgcgcttatggcattcatcgacaagcagtttaagtgtcgtttcatctccaaattggggatctacttttaaataatcaatcgtatcgtatttatggttggaaaacgctttaaagattggtgttaaataaatgccgttaattcctagcttctgcaaataatcaagatgatcgacaatcccttgaaggtcaccgccgaaataattggttgcagtcggtggtgcacttccccaagccaatgtattttcagggtcacgggaatgatcgccattggcaaaacgttcaggaaagatttgataccagatcgtttctttaacccattcaggcggtgtaaacaaatcggcttgattcataaacggaaaacagaaataatcgctaatgtcttttgcaggcgtatcgcaaaacccactttctccatagtaaatcgtctcatcttttgccttaatttcgaacccgtaacgaaggcgatggtagggcggcttcacttccacaaaccaataatcatattctccatcggcccctgcttgtgtcattgtttttttggcagtcacccattcgtttcccgcccaatcgtaaggatctccataaataagcatgacctcgtgagcatcgtctttgcgcgtgcgcagacgaatgtggatcgtatctttgtcatacgcgtaggcatcttcacttttcgggcgatggtagatcgctactttcattcaaaacaagctcccttcttaacgagaatcgtaagcgttttcttgattgttattttcagcctatgagatgaaagagtgaaagtcaagaaaaaaggcaaacgtttgcaatttaattaaaataaagtagttgtttttgaagaatgaacataatataatggcgttataattgtattgtaaccgatttcatttctggacgtttatttgtgcaaacgatttcaccattgtttgcatccttgcaaggcagagcatctggccttgcagaaaaaaagacctttaagggggaaaaacgagtgaaaaaagcgacatctcttttatcgtctgccgtcttcgttgtgacgttgagtggtttgcttactgcgtgtggtcctgatcgcgatgaaggaaatggctctgcaagtgagggcagtgcaacacctgtgaatgaggagcaagacggagcggcgccagaaaagccagaagtgttaacgatgtgggtcaacgatgaagaagtacagttagatgcttatgaacaaatcgtagaaaagtatgaaaaggagactggaatttccgtagagatcacaccgtttagtatgctcgaccaattggagtcactttccttagatgcggcagctggcggcggtcctgaccttttttaccaaccgaacgatcgcctaggtgacatttatttgcaaggattagctgctgagcttgatttaacttcagagcaattagaaggctatacagaaggagcgattcaagcattaaattatgacggggtccagctaggaataccggctgtcattgaaacctatgctttgtactataataccgagcttgttccagaggcgcctaaaacaatagaagagctagagcaaattgcagcagatttaacgaatgccagtgcggatgaatatggatttttatttgaaggcacaaacttttattacctttatccgttcatagaagcttacggaggatacgtgttcgaccagaatagtgaaggcgtatatgacacatccaacattggactggcaaatgaaggaacggcagaaggggcgaatttaattcaatcttggtatgaagcaggctacttaccagtaggaatcaccgacgatattataaaaggctatttccgagatgggcaagtaggagcagtcatttcaggaccttggaatgtttctgaattctcagaggcgcttggtgaccaattagccgttgcgcctctcccaacaattgatggaaaaaacctgtcctcgtattcaggggtaaaaggttggttagtgaatgagtatagcgaaaatcaatattgggcaaccgacttagctctatatattacaaacccagaaaactcccttacgtactttgaagtagcaggggaattgcctgcccgtacagacgtggagatcgatgatgaactgcggcaaccgtttttgcagcaagcagaatatgcggtaccaatgccgaacattccagcaatatcatcagtatgggatccaatgggagacgcatttgaatttatttctcaaggtgaggatccacaggaggttttagaagaagcagtgcaacaaattgctgataagattgcccttcaagaaaattaattaagttggatggagaggttgctctccatccacttgatttcgcagaggaggaagaaatcatgaaattagaagtaagggagaggacggcacgaaatcacccaaaacgagcactctgtttgtctatcatccctggtttggggcaactgtataataggcgttatggaaaaggatcgttttttttcattctctttgctgcctttatcattgtcttttatgacatcttaaatattggttattgggggatcataacattaggaacgttagagagggttgatgattcgcggatgctgctggctcaagggatcattgcccttattttgacggtttttgctgtcggcttctatttgtttaatttgcgcgatgcgtataaggatgcaaagcgaattcaacaaggctggcgaattccctcgctccgtgaaagcttccagcaagcatgggacaaaggctttccatatttgctagtcggtccaggactggtctttttaattttcactgtcgtttttccgcttttgtttatggtcgggcttgcttttacaaactataccctttacaatgccccgccgcgaaatttgcttgattgggtagggtttgaaaatttcgtccagcttgtcactgtaccaatttggcgagaaacgttttttagcgtcttttcgtggacgttaatttggacatttgtcgctacaacatgccaagttgggctaggcttattattggcaattatggttaacgatccgcgaattaagtttaaaaaattcattcgtacgatccttatcctcccatgggctgtgcccgcctttgtgacaattttaattttttcagcgatgtttaacgacaattttggtgcaattaatcgcgacattttcattcctttgtttggccacggctttccttggctgaccgatcctttttgggcacgttttgcgctaattatgattcaaacatggctcggctttccgttcgtatttgctttgttcaccggtgttctgcaaagcatttcgagcgattggtatgaagctgcggatatggacggggccaaccgctggcaaaaatttcgtcatattacgctgccacatcttttatttgccaccgcgccgcttctaatcatgcaatatacaggaaactttaacaacttctcgatcatttacttatttaaccaagggggaccgccgattcgtgggcaaaacgctggcggcaccgatattttgatttcatgggtgtacagtctcacatttgagaactcccagtacagtatggctgccgcgatttcgataatcattggtttgattgtagcgggctttgctttgctccagtttagacgaagccgctcatttaaagaggaggggagcatctaatgaataaaaagcaaaagtcaaggctagaagtgactgctatttacctgtttttgcttattatgggcatcatcattctttaccctcttctgtggacgatcgggctgtcgtttaaccctgggacgagtttacattcttcgaaaatgatcccagaaacgatttcgttacgccattacgaatggttgttctttgatccacgcagcaattatgtgcaatggtataaaaacacgctcattgtcgccagtattacgtctttatgtgcaacatttcttgtcgccttaacggcatatgccttttcccgttatcgctttgttgggcggacacatgggctgtatgcgtttttattattgcaaatgtttcctgtcatgatggcaatggttgccctgtatattttattaaatactgtccaattgcttgatacacttctcgggcttatccttatctatgtaggaacctcgatcccgatgaacgcgtttcttgtgaaaggttattttgataccattccccgggatttggatgaatcggcgaagttagacggtgctggccattttcgtattttcttcacgatcatgcttccccttgcgaagccgattttagcggtcgtggcgctctttaatttcatgtctccgttcatggactttattttgccacgaattattttacggagcccggaaaattatacgctcgcgttaggattgttcaattttgtcagtgatcaatttgcaaacaactttacacgctttgctgcaggttctgtactcattgcggtgccaatcgccgctgtgttcttatttttgcagcgttatttgattacaggcttgtcttctggcgcgacgaaaggataaggaaagcgtataccaaacatgttgagcaagttctacagtagacaaatacgagccgttcattcaatataaaggcaggaagggctactgcgctatcgtgtagtgcccgctcctgccgtgttttgttaagaaaagggggaaaacgagtgggtgttacgatcaaagatgttgccagaaaagcaaatgttgccccttctaccgtgtcaagggtaatcgcgaacaatccaaaaatcagcgcaaagacaaaagcgaaagtccaagcggtaatggaagagttaggctactatccaaatgtcaacgccagaaaccttgtgaacaaccgcacaaatgttgtcggcattattatgccaagtgtttcttacgcaccgtttcaaaatccgtttttcccggaagtgttaagaggcatcacagcacaagcgaatgagaaaaaatatggtttgtatttatcgactgctcaaaccgataagggtattttagaagaagttattgagatgtactattcacgccgtgtcgatgggatgattttgctgtattcaaccgtctctgacccaatcattgaatttttgctcgacaaggcctttccttttgtcgttgttggccaaccgcctgaggcgttgtctggccaagtttcttatgtaaacaatgacaatgtcaaagccgcaaaaatggtgaccgaatatttgttgcttttaaaacatgagcgaattgcttttgttggcggtcgcgaagaagcatatgtaacgctagaccgcaagaaagggtatatagaagcgttagaggaagtaggaatgacgccagatgactcttacatcgtccaccatgatgaaatttttgagggcggcgaacaagcagttattgaactgatgtcacgaaaacatcctcctacagccatgattgtaatggatgacttaatggcattgggtgtactgcgtatgttatttaacatgaatatttccgtgcctaatgaggtgtctattgtgagctttaacaacgtactaatggcagagctggcgacaccgccactgaccacactggacatccatattcatgaactaggctaccgggccgctgaccttttgcaaaaacgaatagccgatcctgaagccccggcggaaaagaggatcattagccacaaattgatccgccgggaaacaagtgctgtctactcgggagaacgacggtaactcccgagtggctaaagtcccctataggaaaacatacatatatccatcctattattcgtatgaggaattcgcattttataataaggaaatacagattggtaacgctttcaaacaatatatgttatagtaaatgcatagtatcgatctttccgcgaaaggagggcgctatgcttgtttgcggccgttactaggtggtttgaccgcatcgtgcaacgctatttgccagatgcctttttgtttgcgggattgttaaccattcttgtttttctattgggcgtgtttgttacagatgcttcgcctgtacaaatggttgattattggggctctggcttttgggatttgctttcctttacgatgcaaatggcgctcattgttgtaaccggttacattttggcgaatacgccgctgtttaagcgcctattatcaacgttggccgtattagcaaaaacgccaggccaggcaattgtgcttgtaacgtttgtggccagcattgcttgtctgatcaattatggctttggcctcgttgtcggagcgctttttgccaggcacgttgttcgccaagtaccaagcgtcgactatcgtatactggtggcggctgcctacagtggttttcttgtatggcatgggggattatcggcgtctatccctctgacgattgcaacagaggaccactttttggcggatgtaatggggacgattccaattgccgatacattgctgtctccggccaacctttttattgtatgcgctttcttaattagcttgcctgtcgtgaattatttccttctcaaaacgtcgacttcttcttacacaattgatatggctcgatttgctgaagaaaaacgtgaggaagcggcggctgttgcggaaacgccagcggaaaagttggagaatagtcaatgggtgtcacttgccattgctctgcttggcttaacgtatgtcgtactgtattttatcgaaaacggccttgacttgaacattaatattgtcaattttacgtttttgtttttaggcattttatgccatcgtacgccaaggcgctttttaacagcagttggcgaaggcgtgaaaaacgccggaggcattattattcaattcccattttacgccggaattatggggatgatggtcggctcagggctgtctgaacagctttccctttggtttgtgtcgatttcatcagcagagacgttcccgctatggacgtttcttagcgcagggttactaaacatgtttatcccttctggaggcggacaatgggctgttcaagggccgattatggtgccggcagcactggaactcggtgcggatatggcgaaaacagctatggctgtcgcttggggagacgcatggacgaacatgatccaaccattttgggcgctgccattattagcgatcgcaggcttaaaagtccgtgacatcatgggcttttgtgtcatattgcttttttgggcatttgtgccaattgccattggcctgatgtttttttaaacgtcaaggttgcataaacatattgcaggggaggatgaacgatgaataaaatcattccgacgacagaggaagcaatggcgtttatcaaagacggttctacattagtagtaggcggtttcgggttatgcggcatccctgagcatttaatcgctgccgtgaaaaacagtggcgcctctaatttaacagttgttagcaacaattgcggcgtcgatgattttggcctcgggcagctgcttgaaaacaaacaaattagcaaaatggtcgcctcttatgtaggggaaaacaaacggtttgaacagcaatttttaaacggcgaactagaagttgaactcgtgccccaagggacgctcgctgagcggcttcgagcaggtggcgctggcattcccgccttttatacagcaaccggtgtggatacaccagtcgctgaaggaaaagaagagaaaacgtttgacggcaagcgatatattatggaacggggcattgttggcgacgttgctttagtaaaagcgtggaaagcagacccatttggcaacctcgtttaccggaagacgtcacgcaacttcaacccgctcgtagcagctgcaggaaaagtaacgattgtcgaggtagaggaactcgtcgacttaggcgaacttgatccagaccagatccacaccccaggcatctacgtgcagcatatctttgtcggtgattcctttgaaaaacggattgagcgccggactgtggcgacggtagaaggaggaaacggacaatgaaggaaacaagaaaacgcattttgaacagggcggcaaaagaagtaaaagacgggatgtgcgtcaatttaggcattggcatgccaacacttatcgccaatatcattccagatgacgtccatgtcatgctccagtcggaaaatggcttgctaggcataggggcttatccgacagaggaagaagttgatcctgacttaattaacgccggcaaagagacggtaaccgcaaaggtaggcgcttcttacttcgacagtgccgaatcgtttgccatgatccgcggcggccatattgacttggcgatactaggcggcatggaagtcgccgaaaatggcgacttggccaattggatgattccagggaaaatggtgaaaggaatgggcggcgccatggacttagtgcaaggcgccaaaaaaacggtcgtcattatggaccacaccaataaatacggcgaaacgaaagtgaaaaacgcctgtacattgcctctaaccggcaaaggggttgtcgatttgctgattaccgagttggccgtctttgaatttaaggatggcaccatgacattgactgaattgcaagaaggcgtatcgctcgaagaagtccaagaaaaaacagaagcgtcttttcaagtcgcattaaaggtgtaataagcaggcgaagccaaaagcttcgccattttttcgccttattctctctgttgacctgtttgttcgttttgcccataatggcagtaagagactgaagaaagggaagaagcttacataggtcttcaaaggtggcggttatgtacgagaacttagaagaatgcattcttgatttggaaaaacatggccacctcgtccgcattgaagaagaggtggacccgtatttggaaatggcagcgattcaaaggcggctttaccgtgaaggcgggcctgctgtgttatttgaacgggtaaaaggatcgaaatacagggctgtggccaatttattcgggacaatggaacggagcaagttcttgttccgtaaaaattggcacaaagtcgaacaagtcatcgcactgcgcgatgacccaatgaaagcggccaaacgccccctgcaacagcttggcaacggtttatccgctttaaaagcgctgccaatgcggaaacctggcctcaatggctcacaactggaagagatttctctttccgatatcccttttgtccattcatggccgaatgatggcggcgcatttgttacacttccgcaagtgtacagcgaggacccagataagccagggttgatgaacgccaatttaggaatgtaccgtgtccaattaaatggcaatgactatgagccaaataaagaagttgggctccattatcaaattcagcgtggcattggcgtccatcaagcaaaggcggcgaagcggggcgaaccgctaaaagtcagcattttcattggcggtccaccagcgcacacattgtcagcagtgatgccacttccagaaggtttaagtgaaatgctgtttgctggattgctggctggccgccgcttccgttacggctatgtggatggctatgccgttagccacgatgccgactttgtcattacaggggacatttatccagacgagacgaagccagaaggcccgtttggcgaccatttaggttattatagtttgacgcatccgtttccagtaatgaaagtccataaagtttatgcccgtaaaaacgccatttatccatttacagttgtgggccgaccgccgcaagaggatacgacatttggcgcattgatccatgaacttactggagacgcagtcacacaggaattgcctggcgttaaagaagtccatgcggtagacgcagccggtgtccatccacttctgtttgcgattggcagcgagcgatatacgccgtaccaaaaagtgaaacagccgatggaattgttgacgatggccaatgcgattctcggctttggccagcttagtttagccaagtatttatttattaccgcagaagaggacaagccgattagcacccatgatgaagctgctttcctccaatatattttggaacgaattgatttgcgtcgcgacattcattttcaaaccaatacaacaatcgatacccttgattatagtggaacagggttaaatagcggaagcaaagtggtgcttgctgcttacggtgaaaagttgcgtgagctgtgtacggccatcccttcggaactgaaagaatgtgacaagattacgaaagcgagctacgtaatgcctggcgtagtcgcgattgaaacgaccgctttttccaattatgagcaagctgaacaagaattaaacgagttaactgctgcgatcgctaagaaaagctccttgccaagctgtccgcttctagtcttatgtgacgacagtgagtttgtgagcgcatcgcttgccaactttttatgggtgacgtttactcgcagcaacccttctcatgacacgtatggcatcaattcgtttatcgagcataaacattggggctgcgatgcgttaattattgatgcgagaataaaagggcaccatgcgccgccgttagtagaagatgaagccgttgagcagcgtgtcgatcgcttttttcaagctggcggccctctagcccattcatagtcattagaaaagaggttgtcgccagtcgacagccggaggccagttgaatttactcaactggcctttttaatgcattcatgaaaaggttgttgacatttatttcgaatttaatataattgaattagagataattaactgaaaggggccatgcccgatgaacagtttaaaaggcatccatcatgtaaccgcgattacaagcagcgccgagaaaatttatgaattttttacgtatgtgttagggatgcgccttgttaagaagacggtgaaccaagacgatattcaaacataccatttgttttttgcagatgataaaggcagtgccggtacagacatgactttttttgatttcccaggtattccgaaaagctcgcctggaacagatgaaatttatcaaacatcgttccgcgtcccaaccgatgaggcgctctcttattgggaaaaacgatttgaccgtttagccgttaaacatacaggcattcaaacgctttttggcaaaaagacgctggcattcgttgatttcgacgagcaacgctaccaattgatttcagatgaaaacaaccaagggatcgaatctggcacgccatggcaaaaagggccggtaccacttgaatatgcgattactggcttagggcctatctttattagagtcgccaactttgatttctttaaacaagttttggagcaggcgcttttctttaaagaaatcgcaacagaagggtcgctgcatttgtttgaagtcggaacagggggaaatggggcgcaagtcgtcgtggaacataataacgttcttccccgggcccgccaagggtatggcgctgtccaccacgtcgcttttcgcgtcgaagaccgagttgtgcttgatcagtggacggaacatatggagaagcttggcttccatacttctggttatgtagaccgccatttctttgagtctctatatgcccgcgtctccccgcaaattttgtttgaattagcaacggatggccctgggtttatgggcgacgaaccgtatgaaacgctaggagaaaaattatctttgccgccatttcttgaagagaagcgcgagtacatcgagagtgtcgttcggccgattgacacagttagaagcgataaaacgtttaaaaaagagtaaaataaacaaggaatggctcttctcttgagccattccttgtttgtttgcagtgctcattgcgtgaacgatttgattttactattatggagaaagaacggcagactatactgcttttggaagaatgtgtttctataaaagcttaaaggagactggcaatgacagaattcaaacaaacccctcacattaatgcaaaaggagagatcgcggaaacggtccttcttcctggagacccgctccgggccaaatttattgccgaacgttttttgacggatgtcgtccaatttaatagtgtccgcaatatgtttggatttaccggtacttacaatggcaagcgtatttctgtcatgggaacgggaatgggaatgccgagcatgggcatttactcgtatgagctcattcatgtgttcggtgttaaaaatttgatccgggttgggtcctgtggcgcccttcaagatgatttgaacttatatgacgtcattttaggaatgggggcatcaaccaattccaactatgtaaaccaatatcacttgccaggtacattcgcgccacttgcttcttattcgttactcgaaaaagcgaaaaaagcggcagacgaaaaaggcgtgcctgtccatgtcggaaacatcctttccagcgacacattctataatgctgatgaagacgcagcagggaaatggcgtgatatgggaattttggggattgaaatggaagcggcggctttgtatatgaatgctgcccaagccggcgttaatgcgctttgcattttgacggtaagcgaccacatatttaaagaggaagaaacaacagctgaagagcgggaaacctcgttcacgaacatgatggaaattgccctagaactagcctaattaaacttagcccgagaatccatctcgggctgttttatgcctttaaaacagcccttacaggagtatattgtctgcaagacagttgcgaaatgtccgtttgtctggtataattcgtaatcattacgatttaagtgtaggaggcagcaaatgaacgtacctgtgactgtgttaagcggttttttaggagccgggaaaacatccgtgttgaaccatgtgctgaataacagaaaacagcagcagcgaattgctgtgattgtcaatgatatgagtgaagtcaacattgatgctgatttagtagagcgagggggattttctcggtcagaagaaaaactggtggaactgtccaacggttgcatttgttgcacattgcgagaagatttgctcgttgaagtcaggcgtctaatcgaaaacggggacatcgattatttattaatcgaatcaacaggcatctcagagccggttccagttgcccaaacatttacgtatgaagatgaagggacaggcatcgatttaaaatcattatgtacgcttgatacgatggtgacggtcgtcgatgcataccgcttctggaaagattttgattcaggcgagacgttgctagaccgcaatcaaggcacagacgaaacagatgaacgcacgatcgtagagctgcttgtcgatcaaatcgaattttgtgatgtgctgatcgtgaataaggtggacttgcttcaggaagaagaagtgaagaaacttatttcgtttttaaaacatttacagccccatgcaaaaatcatccaaacggtaaatgggcaagtagatccaaacgaaattatgaacacaggattgtttaatgaggaacaagcgatggctcatgaaacatgggaaaaggaattggaaaatgaacatgttccagaaaccgatgagtatggcatctcgtcttttgtgtttagagatagaaagccctttcatccgctgcgctttaaacagtggtgcgaccattaccctgacgaggtgacacgggcaaaggggactgtttgggtagcaagccgcaaagaactagcactccaactgtcacaggcgggtccgcaagccgttttgcagccacttgcgtattggattgacagtttgcctgcggccgaaaaaatccatatgaagcaaaatcatccagaaatcgctagcaaatgggatgaccgttttggtgaccgtatcaacgaaattgtatttattggcatcgacatggatgaagcacaaattcataaagagctgcaagcatgcctgttgaccgatgaggagctttcgcaagattggagccagtttgtcgatccgtttccgtgggtggtttcacgcgcgaattaaatcgtaataataatgattttcaatattaaggaggccagaaaaatggcgaaaaaagcaaaagtacaaaaggaattaaaacggcaagaacttgttgcccagtatgctgaaaagcggaaagaacttaaagaaaaaggagactatgttgcacttgcaaagctgccgcgggattctgccccaagcagactaacgagaagatgccggaaaaccggccgtccacgcggtgttttgcgcgactttgaattgtctcggattgcttttcgggaactagcccataaagggcaaattcctggtgtcaaaaaagcaagctggtaaagaaggcatttgctctcctacattatgtaaaccccaggtcagattacgcctgctgtatgtatggcaggcgtgagctgtttttatgttacacgtggaacatcaattgacataactgttttctggtggtatgttgaagaagtattaaaccttcatagagggggacgtttttatgtatctggtggttcttaactaaatccgtaattggatagctggaaagcgcaaaaaacgcagtagttgagcgtttatttgacttgcgcgttttcagaacagttaagaacacgtgatcatagctaaaaggatgaatttgctatggcgtagtgtcatggtttttttgtgttgtcaaaaaaacgatgacgacttgccattcgtttaccttgccgtcatgagcgattgttcatggcggctttttgttgttttagaaaggtgctaaaggatcgaatacaaaaggaggaaattgaaatgaacgaacagacgcttcacgcacttggtttttatgaactgcttgctgatatcgctgcttatgcccgcacagagacaggcaaacaagcaattttagacatgcgtcccctttatgagcaaaaccgaattgcccagcaattgaatgaaacgagagaagcaatggccattgtggcgaggagcagcagtgtgcccattcattcagccaatgaactagaaagttatttgcaacaagcccataaagggctctatattcgtgccgatcagcttgcgcatgtcatctcttttttagaccattgccgaaaattaaaacggttcatgaaagacaaacatgcgattgccccgattgtaagtgcttatgcgttttcaattggcgatcttcatgctttggaagagcgcctaggcgcgtgcatacgccttggccaagtggatgaccatgcttcaagtgatttggcttacgtccgtcggcaactgcaaatcatccaaacaaaactaaaagacaaagcccagcaacttgtcaacaataagcgttacgcgccgtacttgcaggataaaacgattgtggacagaggagggaaacttgctctcgctgtaaaaaaagagtttcgcaccaaagtggagggcacggtgattgaccaatcgtcttcaggggcgacactctttattgagccaactgctttaggcgacattcaagaggaacgggcactgctgcaaattgctgaggaggcagaagtagaacggattttatatgagctgactgaaatggtgctcaaccatgaaacagagattcatatcgctatcgaaacgatgcaccattatgatgtcctatttgccaaagcgaagtattgcgcttcgatagacgctgctgttcccactttaaatgaagaatacaggattgacttgcgcaacgcccgccatccaaaacttggcagcaaagctgtccccctctctataaaagtggatgagcacgaacgggcccttgtcattacagggccgaacacaggggggaagacggtgacgcttaaaacggttggcttgctgacgttaatggcgcaaagcggtgtgccaattcctgctgagccagagagttcgattgcgattttccgccaagtgtttgttgacattggcgacgggcaaagcattgcagacaacttgagcacattcagttccagaatggtcaacattatttctattttgcgccaggcgaatgaccagtcgttgatcctcattgatgaactaggttcaggcacagacccaggcgaggggatggcactggcaacggttattttagaacagctttttcaaaaaggggcaacgttgatggcaacgacccattacagcgaaattaaacaatttgctacaaagacgcctggatttgtaaatgcagcgatggaatttgacttggctacccttgcgccgacataccggttaattattggggaaagcggcaaaagccaggcatttgatattgcgatcaaactaggtttgcatccgaagatggtggaacgggcccatatgctcacttatcaaacagaacgttcatactcagcagcatttagcgatgaacaattaaagcaagcagcttatcagaaacaaatagtggccaataaatatgctcgggcgagaaagaaagcgccgcaaaaagcagaccaagacaagctagcttcctttcgtcaaggggatgcggtgacagtaatggcgacaggcgaacacgctattgtttataaagggcctgacaaaaatgggaattgtgtggtccagctaaagggagagaaacaggtgctgaaccataaacggctaaagctagcgattccagcaactgagctatatccgcctgattatgattttgacattttgtttaaaagcaaagaataccgggaaacgaaaaaacaattaacgaaaaaacatgtagacggtttgacgctggaagaggaagactaagggagtcattgccccttctgctccgcgtttacacgaacagcagcagtgtgtcatactaaaagcaaggcctatttttgagaagtcctagaaagggaggtttggatggcaaacataaaaattgtcactgactctacttgcgatatagataaacaagaaatggaacggctcggcatcacagttgtccctctttccattgaagttggcggaaaaacgtatcgggacggcgtcgatataacgaaaaaggaatttgctacactccttaccgccggcggtgccttgccgaaaagctctcagccgcctgtcggcgtatttatggatgtgtatcagcgtctgcttgaggaaggagaagaagtgcaagtcctttctcttcatatgaccgaggcgttgagcggcaccgtacaatctgcacaaatggccgcagcagaaatggacggacgcgtcacagtagtagattcgcatttcatctccactgccctatcatttcaagtgaaggaagcagcggaaatggcggctgctggggaaaccatggagcgcattttagcggaaattgaacaaattcgtgcaaagacgtctttatatattgctgtcgatacgcttgaatacttggcgaaaggcggccggatcggcaaaggaaaagcattgctaggttcgttgctcaaaataaaaccaattgccgctctgaaagaaggcacgtatacacctgttgcgactaaacggacttacaaacaagtagtcgattttttcacagaaaaattccatctagagacggctggcaaaaaagttggcgctgtcggcatagcccatattgaagccgaacagcttggcaaaaaaattgtagatagcctaaaaaaggtccgtgccgacctgtctgtatctattctcgagacctctccgattattagtacgcatacagggccgggggccattgcattaatgtactatacacgttagcactggaaaaaagcttatgcgaacgcataggctttttgttgttggtttaacgatataggggaaattcttgaataatgccctgttgcacatatgaaatcagtttccgagcttctgtttctacccgttttctcccaaaaggagagagatgccaattttcagccgttgtggttttgtcgtcgactggacaaagagagtattcgatccaacttggcatgtatgtccgcatcattaaatagactcgtggcatatggtaagaagcggtaacaaggagcagccgtttgattcggtgcaagtcaatggcccggtcgagcacaagcaaggaagcgagcacgttttctttcgtgtggagcgagcggtcttccacaagaatatctttggctgcaatgccaagtgacaatgcttttgctttcatcaatacggcttctggcgttttggtctcgtcccaagagacaccgccagaaaacaatagtttccttgcccggccctgtttataaaggtcaaccgctttaggcacgcggtactcgaccgctttgctgctgccagggacgaaaatgcagtcaccgcttttgccgtcatcttttttgtaaccgtacagaagcgttgttaactgctcgtcagtaagggtagccggatcgagttgcgagattttcatcatccacctccaatagatgaagccatgcaacttgctttctttgtatttatcttttattatccgtggcaatgcccgctttttcaactaaaggcgaatggcgatttccgtcgaaatgaatttggcgatgtttttacaagatcagctaagttgttttaatataaaaatatgcgaacgagctcgttggtgattacgcgtttcgataaggcagtttgtggagtttgacgcatccattgagaggaatatggatacccgcgaatcggctttgcaacgtagattgtatgtttgtcttttcaaagtatgcataaaaaacctccaacctaagttggaggctaaagggggagttggggaatacagctttagtattccccaattgctctattttatgcatctttttctatttttctcttaataaatttttgggcggctttaaaaaaacgttgacgaaaccggcaaatgaggatatagttaaaccaactactttgcaatgcaaagtagttggtttaacccttactatcttgcataacaaagtagagggggaaggagaagaaaatggcaataagaagccagctgcttaaaggggtattgccagcatgcatactagcagtgattgacagtcagcccgtttacgggtacgaactcgcgcaaaaactagaggaaagcggcttgccagaaattagcgacggaacgatctatccgattcttttgcgtctacaaaaacagaagctggtttacagcgaaatgaggccatctgaaagcggcggcccgaaacgcaaatattattttttgacagctgaaggaaaaaacgaattatggcaaatgcgggcggagtggggagcaattgccagccctgtgtcaacgatgttaaaggaggacccatcaaatgtttaaaaacaatcaaaaggaaataaaggcgttaattgaagaaaacaaccgcttgcgccagcaactcacaccagacaacttaaaattgtatgaagatatgatgctttatattcgcacagacatgcggcttgctgagtatgaaagtgaacagatcttgatggaaatgctgcatcatattatagacagccaaaaggacggaaagacggcgaaggatgtatttggcggcaacccgaaagattacgcagaagaattaattgcagaactgccacgagaaaagaaacggaatgttgcccaatttatcattgcccaagtagtggtcctgatcggcattgttagtttagtggaaggacttggaaagttggttttgcctttatttgggctaaaaacgcctggcgttataacaggaagtttaatggttacgctactaatcgccattatcggcacaggcgtcgctatctattggatttttaagcaaatacggaaagatctctttactgaagggaacagctcaaagaggcaatatatcaaagtaggcttgatcggtgctgttgcctttattgccctagtaagcattgtttatctgttgccagattggggcatcgctcttccttttgcttggtggacatatgtgctaaccggcgtgttgttgctcgtgattggaaaacgtctgcaagccgcttaaaaccggcagaataagcttctccgttaaaggggctttatggatgctaaatttggaaatgtaggaggtattcaatatgtctacagaggttctttcgatagtagcgattttttctatcgtgatatggatagcggtatcccaagaggctgtaaaaccctcgaaaacgataaattggcgaaaaatgataacattactatcagctggatcattatccacactcattctagtcatctctctttttcaacagcttccattgtaaattgttatattgcagctgtacgaaaagggagcttccccaagctttggccttctggcttttggggaagctctctttttacttgttagagaatgatctcattttatgcattttgctttaaagctataataaatcgcctggaaaattgcgtcttctggcttacttcaaataaatctgcaaagagacattttcattcccgtaagaccatacgctattctcgattttaaaatgatcggcaaatgattcaatccacacttgtttagcgtgtagcaacgctgttagttgagcggagttaagtgttacttcctctacttgttcgttcttttggaaaacaaatacgacttttacaaagtctccttgatttgttgcaacgctcattttgcttcctccttttattttattcattataatcccatacggatgacgaggaagaaggtttcgccgtttgcgctgacaattggcgttttttcaatgaacattaaagacggatggctaagaaaaaagggaatggaatgtttcacagcgttaaaggaggaaatgattagcgaagaagagcatttacacaataaaaagttgagcgttcgggcattagctagcataggtaataaaacactgttttcatgcgagttcgttatttaacgggcattgtcattatcgttggcgccttgcaagccctttttcaaaagatcatagacggcgcctgaaaacgtcctaattttatgttgttttcggtagtcttcgacaagttggactagctcttttggaaatttaataagttttggaacacggttcatgattataacctctttaaatttgggatactactaaattcataatgatttgacgtcattttcctaaagaaaacgaatagcaggaaagcaatagaatcaaccaagggattgatcgatttttaagtgaatcatactcctgaaagaaattcgtgtcaacaccttgttggcaatcctctctcttctgtgcaagtaatttcttgcctatttccaggaaaaaccaatcgaaaagcttgggctgagcatatttaacgctaaaatggtaaagacagtgttatgattatgtcgaattaatgaaaagagcaaaacaatgcttataggaaatcctattgtgtaatgtgtaaggagatgggaagtatgcgaaccatttatttcattttagcgctcattttagcgtcacttaatatgcgtcctgcgattacatcggttgctccgttgctagatacgattcaacagcaactaggaatgagtgggctggcgtcaagcttgttgacgacgctacctgtgttgtgcatgggtatctttgccccttttgcagcgaagattagtcaaaagattggcttggaaaaagccatttttctttctttgttgcttttaacggcggccactgccgtgcgggggatcacaggttcagtcattgtcttgattgtaacagcttttttggcgggaattggcatcggtattgctggcccgctcttgtctggcttcattaaacagtattttccgacgcgtccgggatttgttagtatctattccgtttcgatgtcgttaggggcaggcattgccgctgggttgtcagtaccaatctacaacagcgccggtcaaaattgggggttcgctcttgctagttgggccgttcttggtgttgctgctttaacgttttggatcaaattggctctacaaaaacggacagaagtaacggcagcgaaagcgaggctgccattaaaaaacaaacgggcgattttagtgacattgtttttcgcgttaatgtctagcatgttctattcagtaaccgcttggattgcgccaattgtccaagacatgggttatagcaaatcgactgctgcagcgatgcttacggtgtttacatttattcaaatccctacttcgatgctgttgccgacattggttgcgaaatttggccgcttgacaacggtgctagtcgcctgcagcatgctcgaattagctggcatcggcattttgttagctggactccaccccctccctgctgcccttttacttggcattggcgccggtgggctgttccctctcgctttaatgttgccgattgttgaaacagatagcccgcaagaagcaagtgcatggtcttccatgaaccaaggaggaggctacattcttgctgcgatcggcccccttgcggttggtgccatttccgatatgtttggcagcttttaccctgccttgcttgtgatggcgggtgttgtagtagcaatggcagctgtacagttgctcttaaaaaagcatggccgtgcgattgaataagagccctcatgatgcaactaaaaagacgagagcagggcataaaaacccgtactggagaatcatggcgttgtgcgtttacgctctatttttatcagattggttggcaaggcgcccaggaataggcgccttgcttttttattcccctctggtatcgttgacattgagaaaaagcattcccagttctcactttcttcacatttattcgctatactggggaaaaggaggcgaaaactcgtgaactggaaggcagtgatgctagtggcctcgttttgttttttgtttgccggatgcgatcagaaggcgcttccgctgcctgatggaaatgaaccatatgcggttgtcacccatttaaaagagcctgctcttgcatttctagagagcggtcataaacgactagttaggaccgagaaaatagacgagccttggagtgaaatggtccctatcgattccggtcgcatggttgctttagcccaaacagggacaacgcttttggccattgataccaatagcggtgccgttgacgaacttgcccagtttgatgaagccctgactgcagtgacagcgcttcctggccgtgacgctgtagcggttgctgatacggagaaccgtgaagtcaagttggtcagtgtagaacatggcgatgtaatggaggcgtttgcattggatggttcgccatcagaacttttggctgatgaaagtggactgctttttgtcctttgtgcagaccaaagcaacgtttctgtatttgatttggagacaatggaacaaataaattcttttccggtcagcgaacgtccagcagggcttttttttgatggcgaattgctatggactggagggcacggccctacaggcaacttaaatagcgcgattcgcggctatgaagtcgcatcaggcgagatgaaggctgaggttgaagttgggttgatgccaatcgccatcacaggcagtcgcgaggaaaacgaactttatgtggtttctcatggcgaccaccacgtctataaagtaaaccgtgccacgcaaacagtcgttgccaaagcagaagtcgggcagaatcctaattatatttatttatttggaaacgagttgctcgtaagcaattttgacagcgacacattgtccgtattgcagaaggacccttttgagttgacggatgaggtgtctgttggcgcagggccctacgcgatttccgttgccccagggagggaagaagatgggagctaaaacagtgctagtcgttgacgatgagcctgagctgcttgagcttgtagttacctatttgcgaaaagagtcttaccgggcgctgacagctgataatggcgccgacgctcttaagcggattgaacaggatgcggtcgatttggtcattcttgatgtcatgatggaagggatggatggctttcacgtttgcgagcgtattcggcaaaagcattcacttcctgtgattatgctgacagcacgaggcaatgaagctgataaagtccgtggccttaaaaccggtgccgatgactacatggtcaagccatttagcccgaaggaattaatggcccgtgtcgaggcagcgttgcgccgcgcaaatatggacaaaatccgtggcagacgtctcgtttttggagaacttgaacttgaccaagacggtcgtgcggtaaccgttgctggaagccttattagcctgacaagacgggaatacgaattgttgctgtttttagctgaaaacgcgggccgggccttttcacgggagcatttatttgagcgcgtatggaccgatacggccgctagttcgttgcggacggtcgatacgcatattaaaacgttgcgcttaaagcttaatggggccggacgttttatcgaaaccgtttggggcgtcggttataaattcggaggaagcgaatgaagcctttatccattggcgcaaaaatttggctggccattggcactgctgcgttggcctttgtcgtctctggtggttttttaattgcgtttttgtatgaaaagctttatgtagacgaacaacttggccagtttatggaagaaggcagcgcccttgtgtctttttatgaaaaggaaggtttgtcggaagagctgtatgaacgagtggagtgggcgaatgagagaagccgcgctcaatttttactgacagatgatccaatggaattggcgagcggcgccccttttgcagccgatgaagatgcacaactgatcacatttgaggaacggcaaagtttgctggacggcgagacagttgtaattcgccgcgaacatcctcgttttcaacaagagttgctagggattgcccttccgttaatcagtgaaaataaattagaaggcgcgatttttatttcgatgccattagctgttgtttatgaggcgtttgttgatatccagtgggcgctttatgcagcagtgttgttcgctgctttctttgtcgtcatttcaggcaagcgcatgacgaaacatattgtagagccgctaagggaaatgaaagcaagtgccaaagaaatggaaaatggccatttttcaaagcgtgtcgctattggaaaaagccatgatgagctcgcggaactggctcattcttttaatgagcttgccaaatcattagagcaagtagatcgagagcggaatgcatttttggccaatgtcgcccacgaattgagaacgcctttaagctatatgatcggctatgcagagggcattcaagaaggtgtcattgaaagaaataaaggaatggccgttattgaaaaagaggcaaagcgattagatcgccttgtcaatgatttgcttgatttggcccagctagaaggcagcgattaccgtctagacaaagaagcacttccatttgcagagcttgctcgagaagcggtagctgcattcgcttggcaagctgaacaaaaacacatccaactggaacttgagttagacgaggacagcattattgatgccgattgggaccggatgcagcaagtgttaacaaacttgctcgcaaatgcgattgcttattctccgccttttacaacggttacggtacggatcacttccagcaacggctgggcagaaatggttgttgaagatgaaggagctggtatccctgaagcagacctgtcgtctgtacaaaagcgtttttatcgtgtcaagaagggcaggagcaggcagaatggcggtacgggtctgggcctagcaattgtgcaagagattgtcgccaaacatggcggcgactttcagctagtgtcacaagaagggaaaggcacaaaagccattatacggattaaagaaatcgatgttggcgcttttaaggaaggagaacaaagatgaagcaacgatggttaacagcaacagtacttggtgtcgtcgcattaagcggttgttctgagaaagaggaaacgccttcactgtcggcggaggcaattgaggttgcttttgaaatggcagaggaacagcttgaacttgaaaacattgttcttgaggcgaaagtcatgcaaggagacgagcctgttgatgatgcagaggaagtcgtttttgaagtctggccttatgacgatagggaggaatcggaatttcatgaagcaagctatgctgaatcaggtttataccaagctccattagcgttagaagaagcaggaatttatatggtacaagtccatgtgacggctcggggcatgcacgtcatgcctactcagcctttatttgccggagaaataagcgaaagcgagatcgaacagtttgaggaaggaaactaggctccattaaatgctagccctggagtgaaagggcagtccttttatgtttctacatataaataaaaagggacctgactttgcgaagggggagtaacaatggcaacgttttactcagtttgtgaacaagcgggattggtatttggacagaaatcgaaacgcaaaaatggtgtctgttcaattgaaattccaagaaacttgcatgcaacgattcaaggaaggccgacaaaagccagcctccacattgaagttacgtttaaagcattagaccaaaatggcatggcacttaatttagcagaactcgtgcttttgcaggaagaagtgccggtcgtcgttcggggactggcggagcaaggcgtcattgttagcgcgatccacaaccattggctttttaccgatcctgtgcttatgtacgtgcacgcccaatcagtagaagcgccggtctctttttcacaaaaaatcaacaatgcgcttcgctatattgcgatttgacaggccaatgcccgccccgcctagttttcgaaaaactggttgcaggctttggcggcgtcaatgtccttttgtgtcagtttcccctcatcgactgttgtccatttaatcgaaacggcagtatgatcaatcgtgatgacaggatggtgctgggcgccttctgaataggcagcgacgttctgcacaaaatcaattccttttaaaaaatgatcaaatgtaaaagtacgccaaagcgcttctccctcaaccgtccagccaggtagcgctttggctgtttttttaatttggctcattgacatcctcctcctcccctttatatacctaaggccgacagcttgttaaacataaaaattgtattataagaaaaactgggcaataaacaccaaaagaattgtagccggcacgagcgtacgcattagaaaaagccaaaatggagctatacggccaacaggccccgctgctaactgaaattgatgaaacaataggtcacgcttgattttatagccaacgaataaagcaataagcaaacaaccgacgggaagcatgacattcgagacaagcaaatcggtcagatcaaacaccgttttctcttgccaagcaaacccgcttaaaagccctgccgataatgcagaaggaatcgccgcgacaatgacgacaacaccgcttcccatcgcgacattgcgacggttccagcctttgttttgggtaaaggcagaaataataatttccaacaaacttaaagatgaggtaatggtcgcaaagaagaacaataacagaaacaaacttaaaaacaaagcgccgaaaggcatttgtgcaaaaatcgcaggcagcgcaataaataacagccctggcccagaggctggctcaatgccgtaggcaaagacaattggaaaaatcgcaagaccagccaataatgacacaaatacgttcattgccgccacatacgcagccgagccaggcaaactttgcttttctcccaggtaggaactgtatgtcaccatacaagagaaaccaactgccagcgagaaaaacgattgccccaatgcttccagcaagcctggcgcggttatttttgaaaagtcaggctgtaggaaaaaacggacgccttccatcgcgccttcaagggagaggccacgaaaaataataataagcaaaaacaaaaacaaaagtggcattaagtacttgttggcccgttcgatcccatttttaatgccgaaagacaacacgacgacattcaggaacacgaataacacaagaccgagtatactcgcccaagggctggcggtaatgctgataaacaattgctcgtaatcgcgcccatctacaaggacaaaattgccgaacgacaacaacgcataaagcaaaatccagccgcccacgaccgcataaaacgtcatcagcaaaaagcagccaacaacgccaaaacgcccaatccaagaccacgctttgctgttaacaagcttcgggtaagccgataccgcctcgcgctttgcgccgcggccaatgacaaactcggcaataagcagcggcaggccaatgaaaacggtaaataatataaataagagaaagaatgcgcctccaccatttgtccccgtcaaataaggaaagcgccaaagagcgccaagcccaattgcagcgcccgcggaagcgagtataaaaccgattttagatgtccactgttcactcatacgattgctggctttgcagcagtcacctgccttattatgtattgttttccactttaccacagaaaagcgaatttgccgagaaccgatttgagacgagtcgcatgattaggcccgtcaatagcagagttggcaacaacgaaaaggatttcgtagagatgctagacgttgaaagtacactggctgtttttaagagtggccaacttttacaattatctcagtatacttatcgctcaagctccttcccggcaatccataacgtccagcgatccttctcaacgatcggaccgtcctgttcgagtgtggtatcaatgacatgtacaagttcagccaattccgtatctgaaagctgatgtaaaagcgagcgccctttccgtttcgatagatcagcgagaagttcctgcttgctttgatggatcgcccgtgtctcccatagcgtttcctcacttaaaagggaaaagccgctagaatgaagggcttggcgaatgtgggcgctagaaaagcggcgctttgcttctatgttcctcaggtgtgggaaggcagaaaagaagtagccgcgcacatgctcagcgcttccgggaagaaagcaatcgtcaggcgtacggttttggatgataaaaaggccgccgtcggctaatgtccgccacgcttcttgaaaaaaaggctgcacgcttggcaaatggtgaatgagcgctcttgccaaaagcaaatcaatcgacccgcttgcgagaggaaggtcctcacaatccccttttttaagcgcaatctgttgaaaatctcgacaggccgctttggcatcagcgagcatttgcgcggacgaatcgatgccgatgacatggggaatgccgatcattgccagcgctcgtgtatagatccctccgccacagccaatgtcagcggccgtatcgatgtgtttccgcgacagctggttggcaatagtcgtaagccactttgaatcggcggtgcggccgctatagctgttttgattgcgcttgtcatgaaagtccataaggaaagcctccttgcctttttcttttagcgtacaacagcgggtcgtgtgtagataggaccgattttgaataggaggcgataagaaagtttttctttcaagctcaataaatcgttccgagaaacttctggtaaaggaagggatggttcagtgctttgtagaaagggtagcaacagggggcaaaaaacgctctctttgacttatctatctagctctttttgtaaacgttgttcctgagaggggttcattcaaaatgatacagaataaagaggatatcctaaagctcattcaaagcgataaaaaaatgatgcagatcattaaaactacaagttcccttgatttgcctgattggtggatatgtgcaggatttgtacggtcaaaaatttgggatacgttacacggctttaatgatagaacggagacaccagatgtagatgttatttattttgataataccaacatcgacgagaatgtcgaaaaaggattagagagcaatttgaaacgtttgatgcctggtatcccttggtctgttaaaaatcaagctagaatgcatgtcatgaatcattttccgccttatacatcttcagaagatgcgatttcaaagtttccagaaacggcaactgcattaggcgtgacgttagacaaagacaatcatttggtgcttgcttctccttgtggaatcgaagatgtcctccatttagaattaaaaccgaccccatattttactgaaacaaaagaacgagcggccatttacagagagcggatgatgaaaaagaactggaaggctatttggcataagcttaaagtccactattaaatcagccaagttcgtcaggtaataagcttcatttctgagtactctttctccttttatttttggccaaaaagacgtttccccgaggctagaaaacgagtaacggccatagtagtggcttgcttatcgctcgggctactgttttaaaacactaaagaggtagcaatccgagctagtaacggttttgaaaggaacggatatgagtaagaaatcggaaattatacgaatattaaaggaaaaccgtaattatagacatttactgctcacgactacaattagtggtcttgcgacatggggagcctttattgcgatgctaatgctgttgagcgagatcacggaaacaggtgttcaacttggagcgttatgggcgcttagcgggatcgttcctttgtttatgagttttggtttaggcggaatcattgaccgctttcatacacgcaccgttttaattgtttctgaatgggtccgtgctcctttgcatgccctctttattctcgttccgttttttgatgggtggctcgcctggacgctgttttttatcgttcgctttgtgatcggagtattcaattcattaaacgctgtcgctcggcaaacaatcattcccgaaatcattaaaggcgacgacttaattgtcgcaaattcattaaatttcacattaacgagtacgattcggctaattggagcggctactggcggtacggttattacattgatcgatcccaattatttttgggtgctagcatcgattgctttcgtgatctcagcagtgcttgtttcccgccttcaagttaaaagggaaaaagtaaaaccgaaggaacgccattttataaaagaattgaaagtcggtcttacgattgcgaaaaataaagtgtttatccgctatgtactattatttgcgctaaccggagggttaataatcggttcctttaacttgatgttacagcagatggccgtaataacttacgatatgccggcaattggattaagtctgttgtatattgcagaaggggctacatcagttgctttagggatatggatagcgaaccgaaaatttatgtttgcgaaaattcatacgtatggatggatttacatattgatgggagctacatgggccctgtttggttttacacaaaccatccatcaagggatgtttgtaatcttcctttttgctgccgttggcggatttgtcgttccttttgaacgaatggtgatgcagacacatgtagaggcaaatgcgagagggcgaatttttggattatggaacacgtgcagcttgctttccatcaatattggtgctcttataactggaatggtgattgactacgttggcctggcctatgtaccgctcatcgtcgctatattcgaaatcattttagggattgtctttttcgttcaatttaaagggagaaccacagacgaggccaaaaaattcggagaggtagggtagataagcgaagcagtctaggttagaaagaacggtaagtgattagtagaattgattcgaattatgataattatgggggcgcttatattacatagcatagaaaggttgatgaacgtgaacctacgctgggtgtttgtgattgtcttaatcctctctttgctgcatggagcggttttacttgataatacaggtagagtagccgacttgggtgtaacaattttgatggtgataagtatcagtttagggattatgacggtcgttcttggctattttggaacgaaggcaaaaccaaacctggcgttcggggtacgaacaaaatgggcattaagcaatgacgaggtatggaagcgctcaaatttattaggggggaaactcctgttaattgtgggctttgcctttattattaccgcctttcctgcacgttactattttcgtcacatgaaacatataccacagcctttggaatcatgttcgtgctccttatttttggctgggccattatcgcaatctggtactcttaccacgtctataaagaagtggttgggggcggtgaaaacaaggaagatcggtaaacagtagcggaggcaatatattattgcgatgaaaataaaaaatgagctctatcgagtaggtgggaaatgcccgaaaagtgtttttaaaacctatttttcaaggatgtgtttttttcatttatgcaatgtaaacgcagccaactgttagctaggaaaaggtggaaatagacagtgtagaaaagctatgttagaatcatttttgctgccgtcaactagcgcagtaatatgtcagataattgcatttttcagaaagggattgttatggagtcaacaggaaggatttcaaacaaagaaacattttttattggtctcatgctattttctcttttcttcggcgcaggaaatttaatttttccgccggaattgggactgaacgctggagagcatgcatggccagcgataattggatttttaatttcaggcgtagggctaccgattctaggcgttctcgcgattacgtatattggcagctctgatgcggaagggctaagcaggcgtgttcattctaaatttgccgtagcaataacaacgttgtcgtacttgacaattggcccgttgtttgcggtgccgcggacagggacggtttcttatgaaatggcgattgtgccttttttaaaagatggcggaagttccctttcccttttagtctttacattgatttattttgcgatcgtctatgcgcttgccctgaacccagggaaatttgtcgatcgcatcgggaaaattatcacgccttttttgctgcttgtcatttttatattgcttgctgcggctgtgtttggcccattaggaacctatcaggctccaacggaagcatatacgaattatccattatttaaaggaattacagaaggctatttgacgatggacacgattgcctccgttgtgtttggtatcattgttgttaaagcgattgaggatagaggcgctaaagatcggttaatgatccaaaaaacggcatggaaggcagggcttgtggctggaatttgtttaggcgttgtttacgcaggcctcggttatctcggtgcgactagcgcaacagcgatttcggcacaaacgggtcatgaaatccttgctgctgtttccaatgcgtattttggcgtttatggcaatgtgattctaggccttgcgatcttgtttgcttgtattccaacagcaacaggtctgatttcctcatgtgccatttatattaatagacggtttccgcgtctttcttatccattgcttgtactattgtttacgttattaagccttgtcattgctaattttggcttggaaaatgtgatttcattgtcagtgccagtgcttcattttatttatccgattattatggtgcttatttttcttgcttttctagataagatgattggcgaaagacgatccatttaccaatttgctgtcttattcaccggaattgtcagcttaaatgatggcttgttagctgcaaaccccgattggggctaccccggctttctggcgttgccgtttgccgagcttggactagcttgggtggtgcctgccttgctcggggcagtcattggctttgttgtttcgttgtttcaaaaataatcatctacttacaaacgacaaagtatgcgagcgcatgtttacaatctgggggctgcggtgagcgcagccctttcttataacaaaggagtgagctgcttgccaaccatacaggggtttccaattgacgatgagacacgctgtattcattaccagcaagaaatcgatgttgttgcgatccaatttgcttgctgtggccaattttatccgtgttataagtgtcatgctgagtcagtggggcatgagattaaaacgtggccaaagagtgagtttggcgcgaacgcgatttactgtggcaaatgccgaaaaacgatggcgattagcgactatcttgaaaaaggggaatgtacccattgtggcacacgctttaaccccggatgcgctagacactaccatatttattttgatgtgtgaacgccccgatgcttttggcgattggcccctttaatcaagactttttgaaactgtttatacatacatgagatcccatttgtttcctcataaccagatcgtttccatcataggatatatgaagaaaaaaacaggaggaaagcatgacaaaaaaagtgctgatgttttgcgaccctggtatcgatgattcattggcgattatgtatgcactttctgccccttttattgaactaatcgggcttgtcgttagttacgggaatgtcagtaagaagcaagcagttacaaacgctgcgtatttgctccatttagcggggcggacagacatcccgcttatatctggggcaagcatgccaattgttgaggaaaatttagtatactatcctaatattcatggagagagcggaatgggtccgattcaattgcctgcccatgacgagattccagtccggccatttgcgactgttcctgaaatcattgcccgttttcaaggagaagtgatcattgtcgatacgggaagaatgacagcgctcgcagctgcttttgtcggatttgagaaagaaatgaaagatgtccattctttttatgtaatgggaggagccttttttattccaggaaacgccactccactagctgaagcaaatgtttacggcgacccccacgcggcacagcttgttataagccgtgctactccgttaacgcttgcccccttaaacgtcaccaaccaggcggtgctaccagcaatagtagtggacaagtgggcagaacaagcaaaaaatccattttctcacgttatacgggcgatttgctcccattacatcgaggcgcaccagcaaatgatgcctggcagccttggggcccctattcatgatttggtgccgctgatgctcatccggacaccggaaatggctggttatattgaacgtccaattgaaattattacatatggcaaagaacaaggactgacctatgttgattttcgtcctgggatgagaaatgaaggccctcgaattgccgtcacgcttgattacccgctgtttttgcgaacgttcaaggaaggagtggggttatcttcatagcgcggctgttaagctgataaggcggcttttcctcattggcttctatttgtcgtggatcgatgccttgcgaatcgagtgaatgtttcttgttgtcctttctccttcccatgatcttccgaggctcttttttccctctcaaggcacagcaagccttatttagcgtggtttttcatttttaagcaattggtcgattgaaatggctactagctggagaaaacgttgttggtgaggaacaaggtcattcaatgtcattcgctcgcaataagggcggcggatcttgccttcttccacaaacccgtcactttcgatcgctttgaccgtaccaaaacagagttgataaaaagcggaaaatggcacgcgtaccatgccggcgacttcttcctcttgtaatcgaaattgctcaaacgggatatgttgccggtatacgtatgtaaaagcgaactcataatcatagatatcacggtgtttcggcatacagcggaattgaccgagaaagtctaggtcagcaaaagggatgtcgatccctaattcttctttgacttcgcgtatgccgtcttcggctgtttcaccttcgagcaaatggccagctgcggtaatatcaaacaagctagggaaatcttttttgtgggcgctgcgtcgttgcaaataaatgtaaggctccgtttgagaatcatcgacgatccaacaatggaatgtttcgtgccaaagccccttttcatgggccgtttttcttgttgctgtgccgactttttgttttgcttgattgtagatggcgagtgtttctgtatccatttgcatgctccttataagcggtttatggttagtataacacttcccatgaggcctttttttgctttcatttgcacaaaagcttgttatcatagtactactgtatgaaaaggagtgcctgtcatgaaggggtataagcggctgccgctaaaagggcagattatgctgtttagcggtttaattgtactcgtttcgattttaattttgagcgcctttgtggccaatagccaagcgactggcgcacgagaccatttggcggaaaaggtgcgcattagtgcaagccatattgcccatagtgagatggctaaggctgctcttgtggccggagaaaccaatgacgagctgaaagcttacgtagaaacggttcgagaagaaaatgacctccagtatattgttgtgatggataacgaccgtattcgttatacacatcctgtagcagaacgaatcgggcaaatgtttgttggcgaagacgctgctgatgtgtttaacggccatcgctacacatccgaaggggaggggacgcttgggccgtcgatgcgtgcttttgaacctgtctgggacgaggcaggcaatcagattggcgctgtttctgtcggcatttcgactgaggctatcgccgcagcggtaaaggatagccaatcaatgcttttatggagcgtgttttgcagtttgctcattggcattgtcggtgcttcgatgttagggcaaagcattaaaaaaacgcttaacgggttggagcctgcggaaattgctttagctgtcgaggaacgcaattcaatgcttgaagcagtcgatgaaggcattttggcgatcaacaacgatggcgaagtgctcttggccaataatgcggcgaaacaatttttgcggcgtaccgggtatcatggagagtttgatggcgtgccaatcgaccgtatttggcctgagcttaagctaccagaggcgttgacagcaacaagcgcattctcgaatgagtcgattaagaaaggcgatgtggaaacagtggcaacccgtgtgccaatgtatgtagctggagaatgtgttggcgcccttgcgacttttaatgaacggagccacttggatgacgtcatgaggcgccttgctggcgctgaagtatatgcccatagtttgcggagcgaaacacatgagtttatgaataaactccatatcatccatgccatggtagaaacggagtcgtacgaagaattaacaaactatattgaacaattatctgaacggtaccataaacggacagcaagtgcagcgagccaagtcgaacagctagtagaggatgtcagcattgcccactatttagcccaaaaaattggctggattgaacaaatgggcgtatctgtgcaagtgcaaagcggcacaccgtggccaagcatgaatacggctctcacagacgtctgggtaacggtcattggcaacacgtttgacaatgcgtgggaagcgatgcaacacaaagatgaaaaaaaactgacgctgacgcttaaacaagcaggtggagtgctccgctatgtgattgaagacaatggcatcggtttttcaccgactaaacaggaggcgtcacagcgttctacgaaaggtggcgaccgtggttacggtcttgcgaatattagagaaaaattgaagccgtttcatggcacgatcgacattttgtcggaaaaaggggaaggcacgattgtcacgatccatattccttatggagaaaaaggagggaacagcagtgattaaagtagcggtgattgaagatgatatcgatgtagcaaggtttcaccgtcttttcttaagcaaagtagccggttttgaattaattggagaagcccacacgctcgaacaaggcgttcacttgatccaaacacaaaaaccggatctgcttttgcttgatgtgtttgtcggccaggaaaatggcctcgacgtattaaaacgcatccgcgcggaagacacgaataccgatgtgattctgattacatctgctaacgatgcaaagaccgtgcaaacaggttcccgatatggcgttgtcgattatttgatcaagcccttttcatttgcccgctttcaagaagcgttaaaccgttaccgtgctagccagctagacgccaatgcatcttttacacaacaagatgtggacaggctgcttcataaaggcgggcaacgaaaagtgtacgcgttgcctaaaggcattgccaaggaaacagctatccgcgtactgagctgcctgattgaagcggacgactcgcttgcggctgcagaactggaagcgcgcacggaaatctcccatgtgtcgttgcgtaaatacatgcgtttctttgaagaagaacagctggttgagaaagagctcgtttaccaaagttccggcaggcccttacaaacgtataaagcaagcccagaagcagccttgtttttaaaagctagtttcatttaattaaaaaaactagacggatccccctctcttatggaaaaataagaaaacgctttcagattaggggtgatcatcatgaaacaagctttatcaatcacatgggaccgcttatggcagcaacatacaagaaccaaaagcgcgcttaatgttttttcatatgcccaaaaagggaccagtgcattaaaacgagaagcggctgagcatgagcaggcaaagcaaaacagcggaggccagccagagccaaaagaaaaaaagccttattcccgcgctcagcttgtcggccttttattaggtccgctcttgtttttccttacgctaatgttctttcatccagaagggctgccaacagaagggcgccatgtgctggcggtcacattatggattgccacatggtggatgacggaagcaatcccgattccagcgacatcgcttctgccattgattttactgccgatcacaggggcaatggaaggttctgctgttgcttcgtcttacggaaatgacattatctttttattcttaggtggattttttatcgcaacagcaatggaaaaatggaatttgcataaacgcattgccctcttcatcattgccgtcattggtacgagcacgcagcgaattttgctcggctttatggcagcaacggcgtttttgtcgatgtgggtgtcaaacacagctgctgttatgatgatggtgccaatggcacttgcgattacagcgcaagtcgccgaaacactaaaagggcaaaaagaagggcgcgagctgcctaaatttgagaaagcaatgctttttggcgtcggctatgctggcacgattggtggttttgcaacgttaattggaacgccgccgacgattatttttgccggccaagtgagagagctgtttggcattgaagtctcgtttgcttcatggatgctgtttgccacgccattaatgcttgttgttttgctatttacatggttttatttaggtagaattgcctttaaaacgaaaatcaaagagctgccaggcgggaaagaagtcattcaatccgaaagaagcaagcttggccgcatttcttacgaagaaggcattgtcgctggcgtgtttgcctttgccgcctttatgtggatcactaaagatttcttctggagcggcgataacgcgatgattttccaacttccagggatttcagatggcatggtcgcgatcatggcaaccatgttcttgttcttaattcctggaaaagcaagcgctcgcattcttgattgggccgattcaagagacattccatggggcgtgttgctcttgtttggcggcggtttggcgattgcagctggtttccagtcaagtggtttgtcggtttggcttggcgaacaattgacggtgctagatggcctccatatgttgctcattatcggtggcgccacgttgcttattatgatgttgacggaaatcacatcgaacacggcgacggcgacaatgatcatgccgatcgtcgcttcgttggcagtggcgatcaatgtccatccatttgcgttgatggcgccatgtgcaattgcggcaaactgtgcattcatgctgccagtcggaacgccgccgaatgcgattattttcggtacaggcaaggtgaaaattattgaaatggtccgagctggtttttggctcaatgtcttctcaacgattctcatcgtgctcgccgtctatgcattcttgccaatcgtctttgacatcgatttaagcgtttttccagatagcttgaagtagtagaaacagcccgccttcttttaggaggcgggttttagtttgtgtaaaaagcaactaagtataggcaagcccatgcgcttaaattatttttctaatagtagttcaattgtttaaagtgaaactaggaaaacggcttttttcatggcaaaatagagaagtggagaggaggccgccagttgaagcatattgagctggagaaagtgaaagttggatttggacgggggaacagacgccgtcaagtacttaaaaacctatccttgcgtgtgggacgaggcgaatgtttggcgatttatggcggccaaggcgcaggaaagtcgacgctgttggcaatcattgccggccttttagagctagacgaaggagaagcagtcgtaggaacatacaacttaacgaattgcagcacggaagaaaaagccctcatgcgccgtgaagaaatgggcgtctatagcgaggaagcaccattgttcgctgaattaaccgtacaagaaaacatcgcttttttagctgcgttgcaacaaaaaaagcgcaacaaagtttggcttaaagaagttgctggccattttggcgttgagccgttattggcgtttcctactaaagagttggggcattatgattgtcaggcagttcgccttgcccgggcggctgctggtgagccagctgtctttttagtagatgccccaattgacttggagttgttccaaaaacttcagcaatgggcgagaaaacgtcagcaaacgattttatttgcgacgagttcgtatgaagaggcactgtgggctcctcatatcgtggagctggataatggcgctattcgtgaatggggaggcaacaaatgctaatacataggctttggaaagtgatttggcttaacataaagcatcatcaaacaacactgcttttcccattgatgggggcgatgtttgcatgtgccgctttcatctgtctatttttaatgctacaacaaataaatgccaattataagcaaaacgaagcattgcaacttggctatacatacgacttttcgattaagcaagcttctccagaaacaatggaccaagtcggtgctttgccagaagtccatgaaacgtggaggagcatgacaactacagattggcaaacagttactggagaaacgatagaaatattgatgtttgatcagccaaagtttgtagaatcgggcccttattattttactaatcgttcacctgttcaaaagggagaaattgcgctagagcacgattttgtttccgtccattttccagacatccaatacggagacaaagttgaattgatcgacagcgacggcaacaatcatttctacatctttgtcagcctgttttacgggatgtcggaagaggcgttattagttggagacatcgatgaaactgccgacatttacattcgggcaaatacggacgataagactaaagtaagaagtgatctcgaagcgcgtactggcaagaccgtccagcaaaatattgacacgcaatccggtttattttacatcgaagggctaacggctgcttctttccaacaactacaatttgctggctatagtttgcttattggcgcggcagcgatgtttattgcgttttggctcataacgatgaaacgtttaggcttagcgcttcgaacagtggcacgaacagttgtttatttagggcactctcctaaaaggctaaattggcaattggtcgttacgagtggtgtgctagcggtcattttagctgtcttctctacgcttttggcgctaacggcattccatctgtttggctttgctttagcagaagacttggcgacgcggttatcactttatataggggttgctcaattggcttatatcccggtgtcccttcgctttactttgctggcaatggctcttcttctacttttggccgtagtgcttggaagaagcatgctcatcgctcgtgcgttaggtgatcctaaaccaaaccggcatataccgtatccagcaaaaacagggtttgtggtagtcgctttatcagcagcaatggcttttcttgccatttcaccttatcagcaactgaccgaacagatcgacaagctgcagcaggaacgggaagcgctttatggttggactgctgaggaagagcacatatggccgtttgtccacttgcaagcgcctaagaagcaggctgaccagtttctggaacagctaagcgccgatggtttttcgtttgtgacgttaacgaaacaaggcaattatctgattgccgaggaaagcgaaacaagttattcggaaatctatgtagacttgttagccgttccagatcagcactgggaaatggttttgtcgctgctggacgtgacaccgttgctgtcagtagacgacatgaaggccagcaatggagccgtcattattggcagcgacctaagccacgcgtatatgattgatgagacagtcaagttaatgtcgtgggaagaggaaaccgccaatggcgagagaacgttagccgacgggggtgattttgattttcgtgtgatgggcacagccaaaaaagattttcaacgtttaggcagttattcgttcttaatccctgcatctttagcagctcaactagatgtaaaaatagatacgtttacggaagaggagattgtgtatccaatcaaaaccgaagcagcaaaaatcagtgaccatttgcgagaaatgactgcctcttatccgttcgcgaacgtctatgatgaagagcctttttgggaaatggctaccgacaatcctcctgtttcgacgtactatttcttgatgattgccctgtttccttttgtgttggctttatgctgggcactttttcgtataaacacttcttggcaaatgcaattatggctgcggctgctaattgtcgtggtgctgattggtgtcggtgtaggtgcaggctggggggcaagccaactgttcctatcatttggttatacgaacataacagaatggagtgattgatgcgcttctctgtttgcagagagtggagaatatacccaaatgatcccttaaaaaaacaaaaaacgaagttggcaaaaggagatgtccttatgataaagaaacaagccgttttattgctatctgccctgttggtaacagcttgcagccaagcggaggcgaatgtgttggagcctaaacaactttctgaaatcgaacaacgttatttgcaagtcggcaacagccattcatttgtgtatgatgtttctcgtttcgaaccaccagagaaaacattttcatttcagctcgatgtatatgaaaacggccagttctccaatgaatggtcgcaagaaatatataggatgaatgcagacgaaggcgaaacattgtttgcagattgggaagaaatggtgataacgatagacagcccaaattcttatgaaaacgaagacgaaacagcgctgtatgaagccggcctcgtccttttccaagaaggaggctcaatgaaaagcaggcagccgatcgagttgccaaaattggaagaaggggaggtagtaagcatagcaagtgggacgcttgattttaacgaaaaaggacaaagccttgtcacgttttcttgtgacgaggaggtgcctagtacagcaagcactgaagacgggttggcggaaaccatcgaagcgtgtgaatacgtgtttgtgttccgtttagaatgggactaggcaggaagcggagcgtcacattgacacagtcttgaccttagcgtactgttttcattttgttaattcccctacaaaaaacaactaataaaagcatggcggacctttaccgccatgctcgctcgtatggtgaagtctattttgaccgatttctgtgctttacatgaaacgatatctttgttcctttgcctttttcactttcaatttgaagccctgtgccaaagtgccgttttaaccgctggtctgtattaattaatccaacccctgaccggctagcggcttttctctctaaaatgcgttgctgttgaacgtcgtccattccgactccgtcatcttcgactgatacgacggcatgcgttttattgttagaaacttgaataaggacctttccgccatgagggcgtttcataatgccgtgcctaatcgcattttccactaaaggttgaatggaaagaaacgggacttttatgtcgctgtcttctacttgccaatcaatttccagcctctcttcaaaccggactttttcaatgtagagataggagcgcaccaggctaagctcttcctcaatgggaacgagttcgtccatattttgaaattggaatttggcgcgcaaaaagtcgctaaattcctgtagcaaatcatgcattttatcgagggcggtttcacttaaagcggctactgcatttaaggcattgaacaaaaagtgtggttgaatttgtgcttgcagccatgccgcttccaaccgcaattgttcttgaaccatttgtttgatcgtcgttagcgcctcaatccgtgcccttaattctagcgctttgactggttttgtcacataatcgttggccccggccaagaagccagtttgaatatctttcgattggcttctagatgtaaggagcaacacaggaagctcaatcagtgtgaaccgcttacgaatcaatcgggttagctcgtaaccagacagctgcggcatcatcgtatctgagataacgagatcccactcctgggcatctaacatagccaacgcctctttgccgcttgttaccatggttacatcataatcttctggtgatagtatcccttcaagtacttgaagatgggctggatcgtcatcaaccattaatatacgggggcgggcatggcttaattcgcttaagctagtttgtgtcgtagctaactgggcttcgacttctttcatataaagtggcttcttttctaggggtggtacgactgacgacgactgctcgaatgcgggatcgccactcttgtcttgctcatttttcaattcagctaattttaatgaaagtgtaaatgttgagccttctcctacagcagaggatacctctaatgtgcctccgtgaagctcaactaattgcttacttatacttaaccctagtccaaaccctccttcaatcatggtttcgtttgcatttgcttgctcgtacggacgaaagaggcgcttaaggatgtcctcgtccataccaattcctgtatcggaaatcacaataagagcattttcgttttccttaaaagctcgcacggaaataattccttcgtctgtatacttgactgcattatgcaataaattgtaaacaatttgaacgagtcgactttcatccgcgatgacgggtggaaagtctttggcgatttgattaaccattttaatacgcttgacttctgtgctgtattgcagcatgtcaaggactccagtgacaataggttgaatcgataccgcttttttctgtagacggagggatccttcttgcaggctcatcatgtcaatcaaatcattcaaacgcaatgtcagccgatgtccgatcgacaaaacggtttcaagctcttcaatgcttctttcctgtaacatatgccgttctctctttaaaacagagtgggacatgttaaggatgccatggagcggattcttaaattcctctgacatgtttgccaaaaattgatctctgtgttcattcatttttgcagtgttgccgcatgcttttatgttctagtatgcatgtgaagtcacccttaaaccagacagagacagcactatccattaaatgaatcaaatcgaacggaaagtgcacattgccaaaccgcttacccgcatgagtgttcaaaggaactagcccagcagcacaagatatagaagtcagtagtaaaagagggccctttctattattgaaaatctttttaacaattgatattgccgtgctcactttggaaacaagaacgaacaggataatatgttttcctagatagggcaaagccgcttttggcaaataccctgctctggcatccagtaaatcaggattggccccttccacaacaggaagcctcctttccagattagaaatatccgatgccgcataagcatcgccttgttcggcgaaaaactttttttgtcgcaaaatttcgccaatctgtttttgccttctccacttccattcatgaccatttgtaaagcaattgttggctgtttggtatatctcaatagcgaacgatcctgggaaaacgtagctgttctattcataagaaattcggcagcaattcgcttttcctgtttgtctaatgaaataaaaccaatcttctcggaaccgttcttgctaaaagcgtttatttatgaaaatagcaatctattttcaatttaattcgcttccaaaaacacgtcaagggttctgaagaacgacacgactagtcgcccgttttattaattaaaaatggaataaatggttaaatgaatcaataagtagtccttaagagctgattctttagtgttgttttatttgcgcttataaaataatcgaatttgtgcctttaataacatagataattgtacctttttattttcttatttttcccatcttcgtcctgaggaaacagaaaatttgtcatatgacacggggaattttcactaaaaggctctgttgtttggctatttgatcactaataagccacaggaaaatagcgatacaggaagtttaattcgttgaattcaaaatcaattaaatgagcaggatggagctgatatttcaatagaagtcgatagagcgtttggcccagctacaaaatctgctgttgaggcattccaagaagcaacagagcaacgagtggatggaatggctggatctgtaacaatgaatttgttggattttcaagcctatcaattgattggaagaggagactttgttcagtttcttgctcgatttaggaattgaggaggtttcagataagaatcctttccggtctgaacttgaaggtcactcagcaattcaagatgttttaccagatggaaatatcgaggatttgcaagttacccaatacgaatgagggggagaaacattttatttggcaagtttatccttagaaagtaattcaagtgtatatgtacacgcctcttttacaagtgatcgtgatttagatgttgttgccgttgttcatatggaaggtgacttatacgagaatgatgctactcttaccacctatgatgttgatggagaggttaatggagtttgcaaatgattcatttgatattcaaaaggaaatttcttaggctatattaacggtagtgtgattgatttaccaaattaaagtggctaatacggtgccactttatacaattggcagcggctaaaaggtctctcctaaccgctgcgtaatttgaacagtctagttcgccgccttatctgaaacgacataggcagtcagttttacgtctggtccgatttgcatggcttcactgaaagcaagcggcaaggcatcagccattttgtcaatgccgcttccttctaaaaaggttggcgccaaggcgccgccaatgagctttggcgccacatagacgattagtttttgcacaagctgggcttcaagaaaagcggcattcaacgttccccctgcttcgagaagggcagaggaaatcgactctctgtacaaatacgccatcatttccttgagatcgactttcgttgtcccgctcgtttgtacaaggcggacgccagccttttccagccgctcctgcttctctggcaaatgcctcggttccgctgccgtgaaaatccatgtcggggcaaggccatctgtcgttacaattgcatcgacaggcgtgcgcaaatgggaatcaacaatcactcggatcgggttgcgcccattggcgattcgcgccgtcaacgaagggttgtcctttaaaacagtgtcaacgccaacgataatcgcttggttttccgaacgcaggcggtggacatcttggcgcgcctcactggaagtaatccatttgctgtcgcccgattttgcggcaatctttccatcgagcgagacagctgcttttagcgtcacatatggcatacgattgacaatcgagtaattaaacacgtcatttaactgcaccgcttctttttccaagatgccggtttgaacatggacgccgccttcttcaaggatacgaacgccattaccagagaccaagggatttgggtcaagggtagcaataatcacttccttgacgccggcttccactaacgccacagcgcacggccctgttctccctgtatgggaacaaggctccagcgtaacataagcggtgctgcctttcgcttcagagccagccatgcgcaacgcgtttatttctgcatgggcttccccagctttcaaatgggcgcccacgccaataatccgtccttcttttacaagcacgcagccgacaagaggatttgggtctgtttgccccttcattgctttagcgttgtctagtgctaatctcatataacgttcttgcattcgatcaaatcctttcaatagaggccattctgcccggtgcgtggaataggtaaaaagaaacgaggcccgttttgcccgcgtacaaagctacatacaacagattcccattaaatcaagcaatcgtaaaattacttccatagtaggctaaacctaatttacttgcaacgctttgagaggaatggttttccgctaacgtgctatataatggcaaacaacccaacttccgtacagcgatcgcccaggcagcaacaacggcaggcgcaaacccatttccgcgatattcctttaatgtttcgattcccgcttcatgcgcgaaattggtaatacgaacgcttcggcagatggaaacggctctattttgatggacaagggcaacgcaaggctgagacacatctaattctcggataagccactcaaagtcatgtggcaaccagttagcagcattttcccgggtaaggcttttgacttgcagtgagggagtgacttttctagggacaaaatagcacggtcccattgtatattgttgcccatgaaggagagccatgtattctgcaaagtactttggctttgcggggaactcgcttatggaaggctcttctaaagataactcttgtaaacgcgtagcagtcttgtctgctacatcatagcgaaatcggcaaacggccttaccgtcaatcgttcggcctaagaaaaatgcaggagcgggaacggttggccccaagttttcgtttattgtcaacagccgtgaatgttgatcgtgaacaaacaacgcttcaacatgatactccatcaatttgttagcagtgttttcccagtttggttcatacaagtcgtccaattggttcattgaagatgaatcctctctgtttgattgaataaaaacaaaagacggagtcaactaaaacagggggaatactgaatagcttctatgattctgatacacaacaaattttactcagcctcgtctagatgcaataattcctttatgcgctccgagtccttttcagagactgaataatactgatcttcttcaataccccgacgaaaagtaatagtagaattattgtcaaaccaaagataaaccaacatcaccatcgtcgagttatccccgttatttatgtgaataacactatcaggatatccctctgtagaggccggctcttcgctaatagccgactcatgaataatggccttaaattcattaattgtgtctgggtctttgattgtcttctcctcgttaaaaacaatttgatcatcactttggtaagaaccgattaacaactcctcaccatttgaacacccagacatagacataaaaaatactactgctaaaagagcgctaattttccaatgcataacgaccctccttttattaaaataatacaatattttcatttcatttctataaaaaggtttgtcttatttattattcaggtgagttgaaggggggactagcgttgttgttcctctttcttaatagaggtgatgttcgcttttggtagtagtgataggccctgtggcttcttgcttgcctctgtgaaggagcaggggccagtttagaaatgtaagtaggataggctgcatgaaaaagcaacttgacgggatgaggcagtagcctaaagacaaagtgaaaaggaacagcgcacatttttctgcaccattccttttcacaaaaggccaggccctctatttgacaaacgctcagtaagccggtccagcgcgtcttggtccatttctgtatgaatgtcgtacttttgtttatggtaatcagcgacagtgttccctaacgttgcggtatggaggaaaatggcattgcgaacaaacaacccttttgtttgctcagaggaaatctggaattcgaggcgttccctcaaacgatccgcaaacttgccttcttgcccttcaaggcaagttaacgcatgggtgagttggtcggtgcctgtctccatttgttcttgggcctggttaggctgtcgccgtacatcttcttcaaagccgctttgattaaaaggaaagcggtaggtacccacattcggatttagccaatcaaacaacgatattcccccttacttaattgattgagccaatgcttcatcagccgcaaacaatccacgcaaattttctttgtagtcaagcaccaattgttctagctcgcgcatatccaactcatacatctcaataattccgtcgatttgttcaaccgcactggagggaacaggatcaaactccttgcggaaagtcacccctgttggcttgcggatggcatccttggaatacgtatggcctgcttcttgcaaaaacgcgcgccaattcgcttctttgttgctcatcattccttcgacccgctcccgttgttcgaatatccgttcatgaagttccatattacggtagtgataaagaaggccaagagcctcgcgcttttgttccagtgccccttccatggcttgcaacgcgttaacaagactgtcttcatcaacgaggatgtgtgtacctgtcccaggctcaagccggtacgtgaccggttgatggccaggctggtcatacagttcaattaatgtcccgatgctatgcaaatcaaattgctccttggcattgattacagcaagcactttttcatagacggctgtattttttaaggcccataacccgccgacgatatggccaagccctacctcctctttcaggcgttcatttacagattcaggcatgtctgaaagcgctgcccacggattgtctttagctttgccgattaattctgaaagctcggcaaccgtcatttcctcgccaatgatcgtgataaattgcaaaagatgattgatattggcgttataggcaacccgatctaaatctgcatttatgccaagtccaagagaaacaaacgtaccaaacatagggggtctggaaaatacctccgttaatccaggccacggcgtccttggcgtcagcacatcaggaaattcaggcgtttccatatcgcctaagtaatgaatgcttgcccctggataaaacgtatacggaatcgattgagcgtaaagaggctcccctttcactcgtgtatggctaatggcgttcgcttcagcggcataaaagtcgcgagcaaggagaacgagctcttcttcgggtatgtcggagatgtctaatacatctgtggcgctttctaagtaatcaacaaaatcactgtctaaagaggcgagttgttttaagttaacaggcgcatcattcagaccgcgtacatcatcaaagtttttttcaattaaagcgacactaacaatcaaatggcctccgagggaatggccatcgccatagcgcttaataccgtttgtatttatgtttgtttcaacttcttcaatgaaatcaagagcatcctcgatttgctcatctgaaacacctgcaacaacaccaaaagcatcgtaaacgacatcttcgggtgcatcgagatcaacttcagtaccacgaaaaatgtagtaaacgtcgttaatgtctttttcttcgttgtagtggtgaatcgcagcactgtcaaagccagactcgttgccgataggggagtcaatattttcgccactgcttttatatatcgtaatgtcgttgtagtcgatgtcggtaatgttataagaatccaacacctttttaagggagtcaatatccaatggctttccactttcatactggagagcggtaagagcattgcgggtattatcctcaaacgtcatttaaattcacctactttcggaagcgaatgttttgaataagtgtatcaaaaaagcggctttcttggtcgttgttgatctcacaggcgactccatctttgcatgcgaggcggtaagtaatgacaataaattcttcagtgtcattgctttgcactaaagcaaaatagcgattggcgaaatggtcgttcggatcatacgtaactccctttttatcttttagtgtgaaataggaggagccatagtaaatggttacttcatctgtttgaagctgttcatactgttgttcgtaactaaggtcctctaaaagtcgatttagttgtagatgtgctctgtgctctgtcatgttgtctcggtattttagttgaatgtgccctcgaaacccagattcattcacattcttttcatacatattcagagactcaaaatggcgcttgctttcgtattgaactgggtcatccgaaagataataccccgcgggaaaccacatggaaaagttgtttttttctgattgaaaataatggaagccttcgtctatttcgacctctgggtcaagaaagctactcgtaaaatcatctgttaaggcgatatcgtctgaaccgtttagtgcgaacgccatggcgacccctcctcctaatgcaatcaagacaacgatcggaatccaaatgccttttttcatcatccatcccaccttcactctcacgccacctggtgtttagttttatcatagaaaagacaaagggaaaattccactagtacccgcaataaatggaaaaaaggcgctttaggcatagtgaaatagtcttaatttttgagcatatcgttaaagatagaatcaaggtttagaggggaaaagctactgcaggtgatagggagtttgtttggatttaaacagcaaagggaggatggtctcaaggccatttaaattcacctacttttggaagcgaatgctttgaataagtgtattgaaaaagcggctttcttgttcatcgttgatggtacatgtttcttcttccttgcaatataactcataatcaacaaccatgaattctttaaggtcagggctttgaaccaacgcaaaatattgattagcagagtgcgttgccggatcgtaagtcacgcctctttttccttccaaggtatagtaggaagagccgtaatagatcgttgcagtttctgtttgaagttcttcatactggtcattaaacccaaaggcttttagtagaatttgtaattgtatctcagcatcatgttctatcatattgccacggtactttaattgaataaatccccagtactctttttcgttagaatgtgattgatcttcatggatattgagaaattcaaaatggtctttactttcgtaaccgacaggatcattttcgatgtaataccccgcaggaaaccacatggaaaagttgtttttttctgattgaaagtaatggaagccttcatccgtttcgacctccgtgtcaagaaagctacttgtaaaatcatctgttaaggcgatatcgtctgaaccgttgagtgcgaacgccataacgacccctcctcctaatacaatcaagacaacgatcggaatccaaatgccttttttcatcatccatcccaccttcactctcgcgccacctggtgtttagttttatcatagaaaagacaaagggaaaattccactagtacccgcaataaatggaaaaaaggagctttagaagtagtgaaatagtcttcatttttaaacgtgttgttaaaaatggagttaaggtttaggaggggaagctaccagtgttgtggagaaggtggactgtgttgatgctaactgcggcattgcgggtattatcttcaaaccccatttaaattcacctacttttggaagcgaatgctttgaataagagtatcgaaaaaacggctttctctttcgttgttgacttcacaggactcataatcatcgcataatatacggtaatcgacagtaataaattccttagcatcgtggctttgaaccaacgcaaagtattgattagcagagtgcgttgccggatcgtaagtcacgcctctttttccttccaaagtataataggaagagccataatagatcgttgcattttctgtttgaagttcttcatactgatcattaaaccctaaatcttctagtaaaatttgaagttgtatcttagcctcatgttctgacacgttattctcgtacgtgagttgaatgtaccctgtataccctctgtcctttgaagtagtagtttcttcttcatagatattgagaaattcaaaatggtctttactttcataacggacgggatcatcttcaatgtaatacccagcaggaaaccacatggaaaagttgtttttttcggattgaaaataatggaacccgtcatcagtttcgacctctgggtcaagaaagctacttgtaaaatcatctgttaaggcgatatcatctgaaccgttgagtgcgaacgccatggcgacccctcctcctaatgcaatcaagacaacgatcggaatccaaatgccttttttcatcatccatcccaccttcgctcccgccatgtggtgtttagttttatcatagaaaagacaaagggaaaattccactagtacccgcaataaatggaaaaacggcgctttaggcatagtgaaatagtcttcatttttaaacgtgttgttaaaaatggagttaaggtttagggggaaagcaactgagtgtgatggggaagttttgtgtcgcattctaaccgtggattgcgaaggttggtctcatggcccatctctttttcacctactttttgaagcgaatgttttgaatacggttcattattgtccgtcattatgggcggtggtggactatctcttttcccttttcaactaacggcctttgtttagagactaatggattaattaaactaatatatcagaaatagtttttaaaaatagcttgaaagatattttaaatcggattactttatctaagaaaggagaattaaaatatgaaaataactattgaagaattacctgaatccaggattgcttatttccgaaatgttggggagtatggtgaaaagcaaaacaaaaaattaatggagaattttaaaaagtgggcaaaattaaatggtgtgtttgatgattctataattttaggcataccgcgagataacccagagattactcctaaagaggagtgtcgttatgatgtttgcgttgttataaataaagattttaatgtgacaaaaccagctcatattggagaattttctggtgggaaatacgctgtttttttgcttgaccatacaaaagaggcagtcagtgaattttggggcaatattttttctgagatcgaaagaaataatctatcaataagagaacaaccaattatagaaagatatacttcacaaatgattgataatcatttgtgtgaaatattagttcctatacagtaacgaagcggggacatttcctactttctatttaaaggacgaacaactgacacacctactatgtatttcagatctaactgcagaaaccaccataagaaaatgacacagatatgatgtttaaatgttataactttaatatcttattaattttgaaatttatttaaattggatctaaaaaaagcgaaaagaagggttgcggttaggagacatttactgtatcatgtaaaacaatttaatgttatcgtttgatttttcaaaagcactgataaggacatgagttactttttacggtttccagagagggaaggagagctgaaatcttcctaacgcaggagagtaacttaccacctttgagctgtattggagaatgaagtacccaataccgtctatgctacgttacagcaccagagccgtaagttctttttacttatgggaaattgggtggaaccacgggtagaacgcactcgtcccttcttgggggatgagtgcatttttgtgttttgacaattacaaagcaagagcgatgaaaaggacaggaattatttttacggttttcagagagggaagggtaagctgtgatcttcctagcttaggaaaataatttaccacctttgagctgtattggggaacttagtatctaataccgtttatgctacgttacagcaccaaagccataagtttttctttttagcttatgggaaattgggtggaaccacgggtagaacgcactcgtcccttcttgagggatgggtgtgtttttttttatttactttaaaaggagtgtttcttgttatgagtgaaccattaatagctattcaatttccagatggaaagagcaagcaattcccgcaaggtgtaacactggctgaacttgcacaatccattagtccgagtctttacaaaaaaacggttgttggatgtataaatggtgttcctgccgatttagcacgtccaatcacagaaaacgctcatatttccttatatgatgtcgcttcaaaagaaggaatagaagtgcttcgtcattcaacagcccacttattggcacatgcattaaagcgattatacccggctgttcatttaggagtgggtcctgtcatcggagatggatttttttatgacgttgcgttggaccaaccgattaccgtgggtgatttgccaagaattgaacagatgatgaagcaaatcattaaagagaacatggagataacacgtaaggaagttacgcgcgaaaaagctaaacagttgttcaaacaggaccctttaaaacttgagttgcttgaagatataccgccagatgaaacagtgactgtgtacgaacaaggtgatttttatgatttatgtcgtggtcctcatataccttcaacaggcaaaatcaagcattttaagttaacgaaagtgtctggtgcatattggcggggcaatagcgataatcaaatgcttcaacgtatttacggtgtcgcgtttgcgacaaaagatgagttacaagattattttgcctttctagaggaagctgaaaagagaaatcaccgtaagcttggaaaagagctggaattgttcatgttctcagaagaagctccaggaatgcctttctatcttgccaatggtcaaattatccgaaatgagcttgaatcttttttgcgaaatcttcaagccaaatacgactataaagaagttcgcacgccgatcatgatgaatcaacggctatgggaacaatctggtcactgggatcattacaaagagaatatgtattttacacaagtggatgagcaacaatttgcgctaaaaccaatgaattgtcctggccatatgctcatttttaaaaacgggctgcattcgtaccgagatttaccaattcgcatggcagagtttggtcaagtgcatcgtcatgaattcagtggtgccttgaatggtttattgcgtgtccgtacattttgccaagatgatgcccacattttcgtaacaccgcaacaaattgaagaggaaatcacacttgcattaaaaataatcgaccatgtctaccaagtatttgggtttaagtacgaaattgaattatcgacacgtccagatgattttatggggagtgaacacctttgggagcaggctgaaactgctttagagaatgtactgcaaaaacttaattatgcttataaagtcaatgaaggcgatggggcgttttatggtccgaaaattgatattcacattaaagatgccattcaacgcagccaccaatgcgccacggttcaacttgatttccaactacctgaaaagtttgatttaacttatatagataaacaaaacgaaaaaaagcgtccagttgttattcaccgagctgtatttggttcaattgaccgttttttaggaattttaatcgaacattttgcaggtgcttttcctgtttggcttgcgccggtacaagtacaaattgtcccggtttcccacgttcacttagactattgtttaacgatacaatcagaactgaaacaagtaggggtaagggtaaacattgatgaaagtgatgaaaaactaggttacaaaattagaaaagcacaaatgcaaaaaatcccttgcacgatcgtgctaggtgacaacgaattaaaagaagaaacagtcacggttagacagtacgggaaaccggaaacagagagggttccttttgaatattttaaagagaaacttgtgcgacagattaaagaacggagcatgtaataagaattattaagactcagaccgccacagcatgttaacaaccgttcctgctattaacttttcaggagggaatactaggcaatggtggggtacagctaacatgaagcggaatgttagctgcaccctttgtgaaagaaatgatatatcgaattcaagcgttctactcaaccgagtttgctcgctccatgatttcctggacgatcccgcttttcgcatcagcataatgttgcgtggcgccattgacgttgagcaaggtggcgtttgacgcttgcgtacttatcccggtcggcattgttgcttcggagcaaatcacggaaacgcaacattctagtgacttcagaagcgccttcgctgaatacatgcaggttgatgtctgtgtctggtcctttgaacaagcgatgttcataccattcatgctcccgaatgcgtagggtgtaaccagctttttctaagtccgggacataagtcatctcgtcagcggaatcgatcacaactagtaggatatcaatgatgggcttggcccaaaggcctggaactgaagttgagccaacatgttcgagttgcaataccttgtttccgagcacagaacgaattcggctagcctctcgatcgaattgattaggccactctggatcatactctagaagggtaacgggcgcgttgtggggtttacgttcaccaactgtgaccttctgaagatcttcatcacttttaggtggcgggtttgaatgactctgcatggagatcactccctaattatcagttcagcatttcatcttaccataacggttgaaaagaagttaagcggtaattctccgccgttgaaggggaagaaaaggtccagttcgtaatagcggtaaaaaagtccgtaccatctttggttgttaacgcgtgtttgcaaaataatctgagtggtacagtcggagccagctgtatgagtgggtttcggtgttttctttaaaaataaaaatgaaggcttgactctcacgttacgtaatacttcacactttgaatgatcaaaacgtagaggtgaaacgatatgaacattcaagcactgcgctcagaccacatttaccgccaagttatgcaagttccgctagcagagaaaacagagttataccgggaagagatgctggctccgttcatgaaaaaatgggagactcagcaggttccgtataaggctgccgatccaggcggttttgacgtgatgacaatcaataatttcatattccgtgcgccagaagagatgacgcctgagatttccgcggaactcgaacttatatcatccgatgcgttctggcaggaatgcgaagcagtcgttgcccgaagcctgggcttatttacggaaaacggcgtgaaactcaaggtatccgagtacttgttcacgattctcctgggcaacccgaagagccagtctttgttgctaaacgaggggtatagcggcgacggtgggattcccggatacattttgtgcacattgcttccaaatgcttatacgctgcctcgcatgaagcccgcattggcgcatgaagtcaatcataacgtacgttaccagtatatcaagtgggaccacaccgtcaccttgggtgagttgatcgtcagtgaggggcttgcggagaatttcgcaacactgttgtacggggaggagttggtcggcccttgggtgtcgaggacggacgcggaaacgctgaatcgccagatcaagcctttgctgaaggaacggctggatgtaaccgggtttgaccaaatcgcgccgtatctttacggcgacgaattggcaaagctccagaatttcacaccagttggcatgccttatagcgcgggttatgcttgcgggtattatttagtacaatactatttaaagcagacgggaaaatcgattgtcgaagcgaccatcaccccggcggctcaaatcctggacgaagtcaggggatactggaatgaaacaacgattattagcgattaaagacatcgtgcacattaccggcattaccaccagaaccttacattattatgacgagatcgagctgttgaagcccacgttcgtcgccgacaacggctatcgctattacgatcaggaaagcttggctaaactgcagacgattttgttcctgaaggaaatggatgtgcctctgaaagagattgcagccatcttgaagcttccgcttgaggagcaacgcgaagtattaaagcagcacaacgatacgttacgtttgaaaaaacagcgcttagagcgaatctccgcggcattggaggagtttgtggctggaaaggatgtttaccatcttagcattttcaatgattctgcgattttgcccttgccagagcaatatgaccgagaagcgaggtggcgctatggcaagacggaggcttaccaatcctttgagaagaagatgcaagaacggtcgtccatcgaaaaagaacgccagtggcaccagatggaggacgtgttccgaaaaattgccgcctgcatgcattttcagccggatgcggtggaagtacagcaactcgtcgatgagtggcggggaatactcgagcagtcaatgccatgcgacgggcacttattaatgtgcatcgccaacacgtaccaagccgatgcccggttcaagcaatattttaatccgttcagtgagcaaggagatttagcagcattcatgcatgaggcggttatgtattatgtgcagggattgggtgaaagtaagagagagaattgagatgtggcgttttttatggagaagacagattgaatgaattgaaagtgtagatcttttaaaggctgaatggggaattcggcctttttttgtcatgaaatttgaaacgttagccagtttgatttaaaacatagcaaattaacatcatccttttcagaacgaactttgatttttaagtagtcccttaggtcaaataattgatctaagggacagcttttattttctttgtcttttactactcattaaaatgataataccccccatcattagaccaacaataaaaaataaaatactccaagtgattgaaaaagaatcaccaaaattgagcacaatagctaataataaataagctaaaaacatagaaaatccagttaacaaaataaatcggatattcctagataccaagtttatctcctcctcttttaataccatttcctaaagcctgcttagtaaaacgatattttcatccagcgaagaagataatttaaacgaagatattcaataataaaccgagtaaacggtaacatgctttatattgttatgtcatagtttgttacaatttacccgaaaaatgttttctagaagttattaaacaatgctgcttttcttattatgggaattatggtcagtagaattttcattgtcatgtgttcttggttgacaaaggtatctaaagaaaccagttccatcttccgagggcttctagaagtaaagcaccaatttcttgtttgaagtcttctcgatcttgctgcgctaaaactaatagtatataaaaaaggtttagtataatccgctcctaaaacctaggccgcaaacacgtttgcggcctagcccatttcgctcccaatgtcttctttttaacgccaacgatcaaacaaaccggtttccctatcctcatcgcatcctcagtctttttcttgttgttctgtagtaataaaagtaagggcctgttgatgaagtgtataggagacgggtgtctgttcattgatttcgccatcgctgtcgacatcgagcgtttggtggcatgtgagtgtaaattgatcgagttcgagtgcttcgatcccttctgcgtcgttaagccaattttcatcggtgaaagcgtggctgtacatattttttaagagcgtgaagcctgcctccttgacaataaacagatgaagtttgccgtctgataaggagatgtcttttaagaataggccgattgtgccaatgtattggccgttcatcgctaagatcataacggcatcgccgctagatgtttctccttttgctgttgtgatcgtgtacgaaaatggttttggttctttgatcgatcgaattgcgctaatgatatacccaagttttccaaaacgtgcttttgtttctgcctctatttcttttgaagcctcgacaatcatgcctactccagaaaagttggcaaagtagctgtcgttttgttggccaatgtcaatcgcaacagttgtgccgtttacaattgctgtgagggcgtcgtctactgtaggaatttgcaagcttcgagccaagtcattgcacgtgccagctggcacaattgccacagttggttggttgtttcctgccatcaacccgttgacgcattcatggacggtgccgtcgccgcccacgatgatcaatagttcgatgtcctcaggcaactgtttgcatcgttgttttgcttcgcctggcgcttgcgtctggatcaatgtcagctctattacttcaggggcaagtgttgccaatgtttgttgcagcagttcgttgacgtctccttgccctgcgttcctattgtagagcagaatggctttttcgtaacggggcatgccatgtccacctttcagcttaagatcactttccaattggaaaacgaaggaatcgttttccatgctttgtcatacatgtacccgcttttaagcattttagtctgtcgtttccctgtttttcttctggatgaaaaagtttccttggaaacgactgcaataaaacacatggcgaatgtcgtgaatgccctcttcgcgcaatgcttggtgaacttcttcttcgggaatgtcgagaatgtctaaatgcttatgttggagaatgccatccataataagcgggagtgaaagggagctgtgatcgttttttttaaacaccgacaatgaaccagatgactctaacagcgcccaatccacttcttgaatgtcggcaatgtctttatcacgcagctgcatcatgatgtcatcgatgttgtagttttgttttaataaattttcctcgataaaaacgccatctcgtattaacagtaccggtttgccatcaacgacgtcgcgaaaacgctgatttttgacttgcaaataggagaaaacacgggacaacaagatgagcagcgcaatcggcgtaaggccgcgaatgaggggcatttttgtatcttcaattaaaataacagctagctctgcgaccatgatcgtaataataatatcaagaacgctaacttcgccgacgtcctttttgcctgttaagcggaaaaaaagcaggactgcaacaaacataacgatcgttcgtcctgagatggaaacgagctcttccactttctatcacctcagattcagtattggcgaaagcggacgaaggtaaacgtgatcctttctcttgaaccattctacaaaaacagggacaatgaaaacaaaaggcacatggaggagatgttatgcgtttactgcgaatggatgaactatcagcaagagaccgctaccgctggatgagcggggccattgtgcctcgcccgatcgcgttggtcacgacgctaacggaaaaaggaggcatggtcaatgccgcaccattcagcttttttacgatgcttgctagcgacccgccgcttttgtccattgccgtaggcaggcgtgaggggcaaatgaaagatacggcgcgcaatgcggtggccatggaagaaatggtgattcatgtcgtcagtgaaaaaatcgtcagcgatatgaatgagacagcagcaacgcttgcgccagatgagagtgaactggaacggacgtcttttcatttgacggaaagtgttacggtctccgtgccggcaattaaggaagcccgtatacgatttgagtgcaagctcgaatcccacttgccgaccaaaaacgatgcgggggagctatcatttgatttgcttattgctcgtgtcttggctatgcatattgcagaggacgttatcgatcaagaagcgaatggcattgacatggacgctcttcaacctgttgcccgattagcgggaccgaactatgcagggctaggcgcacgttattccctgaagcggccaaaatagcttcgtaaaagtctatgaaagtaatgaaaaacagatgaaaatgatgtatggtctgtttttttttgcgcaaatccgtcataatgaaggagccgcgatcagtgaaagaggaaatgcttcctaaaaataactgacgcacgacaaatgaggatggcgcatatatagctcatataggcgtccgtcatttttttgaaatgattaggttagaggaagatgatgatgaaacgatatattgaaatatgcaagcctttatggacgttattgccagaaggaacaattcatgaagatgaacgattatgcaaacatacgtatacgcaaatgggtggcgcagccgatttgtttattacgccccaatcgtatgaggaaacgcaaaccgttttgaaatttgcccacgaacatcgggtgcctgttacgttgctcggcaatgggtcgaatgtcattgtaaaagacgggggcattcgtggaattacattaagtttaaaaaagctcaatacgatcacatgcacaggagtggagttagtcgcgcagacgggagcgacgattattgaagcatcacggagagcccgtgatgcggagctgactgggcttgagtttgcttgtggcattcctggcacggtaggtggtgcgttttacatgaatgccggcgcttatggcggacagattgccgatgtgcttgagagtgtattggtgttaacggaacaaggggaatttaaaacgctctcgaaagaagagtttgattttgattaccgtaaaagtgtgttttcagccaaacgttatatcgccttggagggcactttccgcctgcaaaaaggcgacatggcgcaaatacaagcgaaaatggatgagttgacgattgcgcgggaaacgaaacagccactcgaatacccttcatgcggtagcgtatttaagcgcccgcctggcatgtttgccggcaagctgatccaagacagcggcctccaagggacacgcatcggtggagctgaagtgtcaaaaaaacatgcaggctttattgtgaatgtggataatgcgactgcaacagagtatatgagccttgtccgccatgttcagcaaacggtaaaagacaagtttggcgttgagctggaaacggaagtgattacaattggcgaagacatcgaagaacctgttagcgattagttaataggtttttcggtgctgcccgttgtgtttgttgatttatagaatcgttaggctgctagatagtgccaaatgtatgaatgtttattttgcaattcaaaacggttcttggttaaataaaagagggggttgccggcctgttagatcagaaagaaggttggagcaatgattaaacgttttttttcctattatgtaccgcataaaaagttgttttttattgactttttcagcgccattgtcgtcgctgttttagatttattttttcctattgtcgtccaatggttcattaacacgcttttgccacaacaagaatgggacaaggtcgtctgggtatcaggggggttgttactcacctatttaatcagcgcgtacttgcaatacaatgtcaattttcttgggcataaactcgggattcacattgagacggacatgcgccaagacttgtttgaaagcatccagcgccaatcgttccgttattttgacaatacgaaaacaggccacattattagccgcattacaaatgacctgtttgacattggcgaattagcgcaccatggcccagaggacttatttattgcgttaatgacgtttgtaggtgcttttggcattatgttttatgtgaacccgacactggctattgtagcgctcgtatttgtaccgttcctgatcgccttgattacttataccaatattaaaatgaatcaggcatggtcaaaaatgtatgcggaaattggcgatgtcaatgcccgtgtagaggacagcgtttctggcatgcgcgttgtccaatcgtttacgaacgaagcccatgaagtggaagagttccgtaaaaataaccgccgttaccaaaaggcaaaagtaggcggctacaaagtaatgggctatacatcttctggcatctttttagcaacgcggctgatgattttatctgtgctccttgtcggcgcatggctgctttataccaattcccttgatgttggcgagtttgtcctcttcattctctatatcaacattttgtttaagccgattgagaaaattagtgcgattttagagctttatccaaaagggatggccggctttaaacgtttcactgaagtccttgatacagaagtagatattgaggacaagcctgacgctaaagtggcgcctgtgctcaatggcgatattgaattccacaatgtcacgttcagttatgaaaacaatcggccggttcttaatgatctcaatctctttatcccggctggaaaaacggtcgccttcgttggtccgtctggcgctgggaaaaccacgattagctcgctcattccgcgcttttacgatgtagatagtggcgctattaccattaatggcatcaacatttgcgacatgacgaagaagtcgctgcgttcgcaaattggcattgtccaacaagatgtctttttatttagcgggacgctgaaagaaaacatccgctatggcaaactggatgcaagcgacgaagacatttaccgcgccgccaagctggcgaatttggacgggctcatcgaatcgctgccagaaggctatgaaacgcaaatcggccagcgcggcttaaagttgtctggtggacagaaacagcggattgcgattgcgcgcacattcttaaaaaatccgcctatcttgattttagacgaggcgacttctgcattagatacagaaacagaagcgcttattcaagaatcattgcaagagttggcggtagaccggacaacacttgttatcgcccaccgactagcaacaatccgccatgccgaccatattgtcgtcgtgacgaaagacggcattgccgagcaaggcacttacgaggagctcgtcgccaaaaatggcgtatttgcgactctaaacaatatccagttgacacatgtgtaagcagagggaacaatccctctgcttttttgcatagttttacgtctactggaaaagctaggctggaataaaaggaaggagttggctaaccaatggatgaatcaaaaaaggcgccttcgtttggaaccaatgtaacagggcaaggcgatgcgctcgatcagcgcaaagccgcaaatgagaaagacgatacattgaccactcgtcaaggccatcccgtgaaagacaatcaaaatgtacgcactgtcggcaaccgcgggcctatgacattagagaattacgatttcttggagaaaattagccattttgaccgggagcgcattccggaacgagttgtccatgcccgcggtgcaggagcacacggctattttcaatcatatggaaaagtcggagaggaaccgatttccaagtacacaagagcaaaagtgtttacaaacacggaagtgaaaacgcctgtatttgtccggttttcttctgttattcatggcatccattctcccgaaactcttcgtgatccccgggggtttgcggtgaaattttacacagaagacggaaactgggacttagtcggcaataacttgaagattttcttcattcgcgatccgctaaaatttccggatatggtccatgcgtttaaaccggatccagtaacgaaccggcaaagcatggaacggtttttcgattttgtctcgcaaagcccagaatcgacccatatgatcacatttgtgttctcgccgtggggcattccggcaaactaccggaatatgcaaggatcgggtgttcatgcgtataaatgggtcaacgaggaagggaaagcgatgcttgtcaaataccattgggagcctgtacaaggaatcaaaaacttgacccaaaaggaagcagagcaaattcaaggaaaaaacttcaaccatgcaacgcaagatttgtatgaagcaattgaaaaaggcgattaccctgaatgggaactttatgtgcaattgatggaagacggcgaacatccagagcttgactttgatcctcttgacccgactaagctttggtataaagaccagtttccttggcacaaagtcggcaagatggtgctcaacaaaaacccagaaaattattttgcggaagtggaacaagcggcctttggtaccggcgtccttgtcgacggccttgacttttccgatgacaaactgttgcaaggacgcacgttctcctattcagacacgcagcgttaccgcgttggcccgaactatttgcaactgccaatcaatgccccgaaaaaacgggtagcgaccaaccaacgagacgggcaaatgacgtaccatgtcgatagtcctcctggaatcaatccacatgttaactatgagccatctgtccttaacggtttaaaggaagcggaaaaagtcaacccagaccacacgccgcacgtgtcaggcgaagtgaaatatgaagcgatcagccgtccgaacaacttcggccaagcaggggaaacgtatcgccgcttttctgattgggaacgggatgagttaattgccaatttagccgatgctctggccgatgttgataaacggatccaaaagcaaatgatcgagaatgtgacagaagcggaccgcgactacggcaagcgtttagaagaagcgatcaaacgtgttcaagaaagcgtagacgacaaagaaggacatgcggtcaaggaagcggaacaagaagggatgccgtctgatccttattaaaaaaacgtacgtgaaaataggaaaaaccgtaggcgtcgattcgacacttacggttttttatcaatcgaacctgtaatacgttttgcaaagttggaaatgatggttttcatgtatacaaagcaaatgtatgctttgtatgagattaggataatcggcgatggggtctggatagcgaatatggccagcaatttcgtcttttatttgatcgaccatgttctccaattgttttgtttcggcgtctatgcttgtcactaattgagcgaatgacgtgttcttttgaatctcttttggcggtattaacatacttggtgctttcatgggcttgtgatgctttttatgatattccttgtatacgtctttactatgcgtttcataaggcttgtttttcctgattgcggcaattggctttgacaatggcaaatacagcttatttagctgtttaaaacgttttaccattaaaaacaaatggtaaaacgtttctccaaacgaccatttatcttcacaaggtcttttccattcttcccctttaaaaggctccatcgccatcgacatttcatgcctttgcttgtaaagtgtgtgaaaatgcttttccatataactgctcttcatagctcctcctagtaatgctgtaatagtactttcacctttgaacaccggttgaagatcgccttattaacgaccctcaaccggctttctaaacagcttccagttttgccctaagaggcttcgccgcttttgctcgtttcgtttttggctcgacgcaaaagcggcattgtaattgccaaagcgagaagcgagacgattcctgccaatgtgaaaatatgagcgatgcctatatgttcagccacaaagcctgcgccgtacgggccaataaagatgccgattgcatagacagattggtagaagcccataacagacgtttttaaggaaggctgcgggagtgaagcaatttgcgagagcaacagcggcaatactacgccgattgtcaagccaacaacgccgtgcaacagactgatcgttgctagtgtagtagcaaacggcatacagaaaaaagtgaagcaagtgacaatgagagagagcgcaatcaaccgaatttcattgcgctttgaaacattgaaaaaagcaactcctaaagatgcagcagcgtgtggaataaagaaagctgccatcagccaaataagctgcccctcccgaacgccgtggacatttgcataaacaggcgtaaacccaaaaatagaaataaacaacagagcgtgtgtaaataatgatacaaacgttaacggcagcagatgtttgatagacaacactgccttgacttgtttccctaaacgttgagagccatgattctcgatttcttgcggcacttccttaataaagagggcaaataagagtccgattcctgccgcgacgatccctacccaaaacggaatgctccagccaaattgttcaacgagaatgccggctgttaccatgctgagaaattgcggcatgaccgtcaaaaattgcaatgttcccattgctcggccagattggcctggattaaaatagtcggcgtacataatcgttgccatcacccacatggcagcagtaacgcctgctagcaaccgtcctgtcaaaacccatgcaaacgaagtggacgatagtaaaatgattccgcttagaatagcgactacaaagccgcctacataaaaatgcttgcgcaaatgtcgcaatgaatcaagcaagacgccaagtggaaaacggagcaacacttgcgtaatgccgtaactgccgagaataatcccgattgccgcatacgtaaagggaatttgttctaaataaaggctaaagatgggcacatagctgtaagtgcatagccaaaaacagaaaacggacaccaaaaagacgagatggtgtctccgtttcaatgcaatagacacaggcattcctccttgctttcacccatcatcttaccatcttttggcgtttgtgtggctgtccttttattcaaagaagcttgatttgaaataagcacgtgacagcgttatactggcaatgactacggaatcagagaggttcccgtgacaaaaggagaagcaccgatgccacaagcgaaaaccatatttgattacattaagccgaccgactatcgttttgtacatatatgcaggcgctgtgaccagccgcaattttcaaatgaacgagagccagcggaagcatgcgtccgctgtggaaatgactcgttccacgttgttccttattacaacccagatcaagattatggtttagatgttgactattatgcaatcacaatgatgtatgcgctgtggaaggaaggattgcacaaaacgcaagttgtttacgatgatttttatcgaaaagcgccgtttgtaaaaggcgttggcgattttagcggcgagcttggcggttacgttgctttcggtggccttggtcacttgattgaaacgataaacaacctccatttttcggaggctgatcttgactatttgcgtcaacaaccagaaggatttgaagaagcgtttcttgaagatttgcgaaaattgcgctttagcggtgatatgtatgcagtcgaagaaggcaaccttgtgttcccgaacaccccccttatccgcttagaagcgccggtatgggagtgcatttggattgaggcgatgcttttaaacattatcaacgctgagtcccttgtgttgacgaagggatcacgtattaaaaccattgccggaaaagacggcttgcttgaaatggggaaacgccgggcgcaagggcgggatgccagtgtatatggcgccaaaatggcatacatcgcaggcttcgatgcgacaagcaacgtaaaggcaggcaaacagttttctatgccgattactggaacacaggcccatgtatatattatgtttcatccatcagagttagaggcgtttctcgcttatgccaacgtcttcccacaaaagaccattcctctgctcgacacgaccgatacgttaaacagcggtttgcctcatgcgattacgactgcacgcaagctgcaagaaaaaggctttgagatgacggctgtccgccttgatagcggcgacttggcgtatttgtcgaagaaagtgcgcaaacgcctcgacgaagaagggcttgagcatgttaaaattgccgcgacaaatgatttggacgaatacaccatcgcttctttaaaacagcaaggagcacaaattgacatttggggtgtaggcacaaagtttattaccgcttacgacaacccagccttaggaggcgtccataaaattgtggcccgacgggctctaccacaagagttgcgagcgggtatctacaatgaggatgactggattccgcttattaaaatatcagagagcatcgaaaaaattctcaatccaggccgcaaaaaagtgtatcgtttattcggcccagatggaatggcaaaaggggactacatttgcttagcccatgaaagcttggagggccaatcagaaattgtcttaaaacacccaaccaatccgttgaaagcgaaaaaaatccgtgattttgaggcagtcgagctccataagcaaatttttaagcaaggcaaatgcgtgtacgatgtcccgacattagaagaagtgcgggcttaccatcaacgccaaaagaacacgttttgggaagaatatttgcgcttagaagttccggaagtgtatccggtttccctttctgacgaactaagaaacatgaaagaacgactgattgaagaaaaacggcaacatgatgatgggtaacaacagcaatccgttttaggtgaagaggggaatatgcaaacatctgagagttgcgccaaaggcgcagctcttttttagcttgctttttaaggggtcagctgcccaattgcagaaaagattgtcaaattttctacaaatctctttactttgcttacgattttgccgatgtaaaagaaaaggacgtaaaaggcgagggaagagatgatcggaaaaaagacgcttaacttaaaatggaaactgtttttggcttttggcctttttctacttataccaagcttagtcatcgggttattttcttattcgagtacaagggacaatgtcgaagaaacaatgcttgagcaagcaagccatacgacagacaatgtccatgcatcgctgcaacaatttatggagctgcaaacagatagcgtccattacgcgggccgtacaattaatgtaaaggaactctcagatgaacagcttgagcaacgccttgttgatttaacgaacattaacgaaaatattttagaagtctacttagttggacagacaggcgaagcggttgcctataacagctcaactggatttggcccagaagaaggcctccaagaatcgtcatggtttaaacaggcgaatgccaggcaagtcgaggtgtcgattagcgaaccaattttgacagtcgaaggggaagaggagcacgtcgaagtcattatgggcacgttaactgctgactctacgaacgttcttggtattcgcattagcctgaaagaactgacgggtcaagtcaatgcggcaaaaatcggcagtaccggctatatgtatttagccgaccaatttgggcggattgtcacacatccgactagggaaacaggtgaatttttaccggttaacttaatgcagcaatttgaagacgaaagcgggcaattccaatctgaggaagacggcgtcgtacgggagctgaattacaacaaaattagccctaccgactgggtgttagttggggcaatgttgccgaatgaggcaagccaaacggttcaaccaattttgcagacgatgctaattgtcattgcagcgacattggtggttgggtgtgtcatcatttactttgtcgtccggtccgtcgttgcgcccctttctggattggctaaaatggcaaacgtgatcaaaagcggcaacttaggtgcgaagtacgaaggaaaggcacttgccaatgacgaaattggcgcccttgctgaggcgtttgacgatatgcgcaactcacttattctgacattaagccatattcaagataaagcgacttatttggcttcttcatctgaagaattgcaagcgagcactgagcaaaatatgcaggcaacggagcaaatcacactcgctgtccaagaggtttcttctggggttgatgcccaatcgtccagcatggaacaggggcggaaagcaaccacttctgtgtcacagggcatctccgatattgttctgtctgcatctagcgtgcaaacagcagttgaccaagcggctgcaatggtggatagtggacagaaaggcgtggaacgtagcgtttcgcaaatgaatgccattgatgcccatgtgtctgaactttctagcacaattgagtcgctagaacagcaagcgaaaacaattggccaagtgattcgcttaatttccgatatttccgagcaaacgaacttgctcgctttaaacgcatcgattgaagcagcacgagctggcgagcatggccgcggtttcgcggtcgttgccgatgaagtcagaaagctggcagaacaaacaaacgaagctgcccaaaacgtgcaggagcaaatacgcggcatacaaacagggacgatgagtgctggaaaagcgatgcaagcaggcaaaggcgaagtggcaaaaggggtcaaagtcattcaagatgcaggtgattcctttacagctatccagtcacatatggatgaagttcgtcaaaaaatcaatcaagttacaaatgaagcgaaacaaatgtctattcaaacggaacagtttatgctttcgtacgacaatatttcccaggcggctgaaacgacgtctgctcatgttcaaaacgtgtcagcagcgactgaagagcagcttgcctcaatggaagaaattttaagttcgaccaccaacctgtcggcgttggctgaagaactggaagaaatgattcagcgatttaaatggtaacgacaacaggggttgccccaaaagtgctttgcagcgatcttttgggacaacccctgctttttagtcttaaaagaagtcgacaagagctggctgttcaccgggaatgaggcggaaaaaatcttgtagtgctttttcgtcgccgcgaatgaagccggcatgcttgaaaaaagtggggcgtttatagccaagcatgagcgccgtcagtgtttggatgtccgtttcaaataccggttcatcgccaccaacagtagtcggttgtgcttttccatttttaaccgagaatgcaaacaatcgatcgttccactctgcgactgggtcactgatacggaacacaaagtcgccttgaccattggcaagaaacgggtaagcttggaaaaacggagcgacatcaacaatgcgggccataaagtatggaatcgtctcagcttttgtttttgcgtctggcagaaaatacgacaagccttctgctgctggcaccgtcaattcagctgtgtcagccatggagtcgtgctggccgataaaggcaaacaaagcatttaagcctttttggtcgccaaagattagttcttctgttgtgaatttccgtttttgaattgtatagatcatataggcgctcggctctcccgccgcgtctatgtacaaaacggctttctttgctttatacgctccgttttgcagatggtcccaccattgtggatcacggacgagcatcccatggcagaggcgcttcttgtagacggcacagattctcggatcagatgggtcgacccgctctaacttgccatcagcaattggcaagggctttggcagttgcttggcatttagtgtataggtagttttctcacaaagaatttcccagccgaatttacggtaaaagctcaccgaaaatggcgctaaatacgacaataagtggccttctgcgcgcatcgtttgcaacgtgtggccaagcagttggcgcacatggcctttgcgtcgttgttcagggtaggaagcaacgccagcaaggccacccattggcatcgtttttccgtggatgtggacagccaaaggcaaaagtgctagttttgagaggagctggccgttctccgtggcgccgatgttaatcgatctgtcccatgctttttgggcacgctggcggtggtcatcagggttctcaacttgaaaagcatagcagctaagctgaaaagcttgctcgaaatctttgtcagttagtctatgaatcgtcatagtaagcatccccctaggttttgcaggctatgttaagtttagcatggcagacggagaatgaaagcgaaaaaatatgatacaatacgatgaaaagaacttaatcataatggggtgtagcgtgaatggcaagttcagtgatagaacggctgcgtcaagaccgcgccgcgcatttagaagaattgagtgcatttttaaaaattccaagcattagctccatttccgagcataaggaagacatccgtgctgcagcagaatggttgaagcaagcgtttcttcaggcaaaaatggagaaagtggaaatcattgaaacgaaaaagcatcctatcgtttatgcagagtggcttgatgcagggccagaggcaaaaacgatattgatttatggccattacgatgttcagccagttgaccctttgcatttatgggaaacggaaccgtttgagccgactgttcgcgatggcaagctttatgcccgtggggctagtgatgacaagggtcaagtgttcatgcatttgaaagcggtgcaaacgatgcttgaagtagaagggacgttgccgtttaacgtcaaatttttaattgagggcgaagaagagattggttcgcctaatcttgatgaatttgtagcgaacgagaaagagcgtttagctgccgacgtgttgcttatttccgatacgacgatgcttgaagcaggcaaaccggctatctgttcggggctgcgtggcattgctgcgttagaaatccgcgtaaaaggggcaaaaggcgacttgcactctggcctgtatggaggcgctgtacaaaatgccttgcatgcccttgttcaattgctcgcttcgatgcgcgatgagaacggaaaaatcacgattgacggcttttatgaagggattgaaatcccttctgcagaagaaatggaaagcatcaaggcgttaggaagcggagaagaggcgctaaaagaggagcttggtgtcaatgaactgttcggagagaaagggtatacagcccgagagcgcacgtggattcggccgacgcttgaattaaacggcgtctatggcggtttccaaggggaaggtgtcaaaacggtgattccagcggaagcaaccgcgaaaatcacatgccgcttagtgccgggacaagacccaattgacatattggaaaaaatcgaagcccatattcaagcgcatacgccgcctggagtgacagtgacaacagaacgtcatgatacaggcaagccttttgtcgctccagtgacagaccctgtatttgctgcatgtgcccgtgcttacgaggaagtctaccagacagaagtggcgtacacgaggatgggtgggtccattccagtagtggagacatttgattcgcaacttcatattccgattgtccttatgggattcggtttgccgagcgagaatttccatgctccaaatgaacattttcatctcgaaaattttgataaagggatggaaaccattgtcgctttttggaaccaatatgcaaataggtaaaggaaaacggatcgccctgttcgtcgccggcctgtcgactacgttttggacgcgtaaccaaaacggtcgggaggccttttccttttattcatccataatggtgtaagtttgtaaagtcagctctaagattcgtttgcataggcatcaagcacgatttatttatagtacactagatatagaaagcactgtgaatggaggagacatattcgtatggaccaacaaataggaccgcacattcagttaattgcccttgatatggatgggacactgctggatgacaatcacgaaatttcggaaggcaatcgtgaggcgattgcagaagcccaggaattaggtgtccatgttgtgttggcaacaggcaggacgttagcaagttgcgggaagtatgccacatcgcttgggctgaagtctttcttagtgaccgcaaatggcagtgaaatttatgactgtgaagggagtgtttttaatacgagtttgatgccgccagaggcggttgaccacatatacgaactaacggagaagcatggcgtacatgtatggggcgcttcaaggaaatcgatattccgtggcaagttgcccgatgacaggcatggccacgagtggctaaaattcgggtttgataccgaagatgatgaagtgcgcaaagcgattatcgctgagctccagctgcgggccatcacagaaataaccaattcaagcccaaccaatatcgaaatcaatgccctaggcattaacaaagcgtttgcgttaaagaaagtatgcgacgacttaggcatttcgttgcaaaacgtcatggctgttggcgacagtttaaatgatattgctatgattactgaggcaggacttggaatcgccatgggcaatgcccaggaggctgtaaagcgaaaagctgattggattacagccacaaacaccaatgatggcgttgccgctgctattcagcgctgggtcgtactgccgcaacagaaggaaaagcggaaagcagaggagaaatcaagttcccattaaacaacgattgggtggcaccgaagatctcgatgtgacatataaataggtttttgtcagagataaggaaagcagcgactgtctcttgtcagaaccagttttaactgggaaacgagcgagatgttcttaagaggcgttgttcgtccaggtgctgcaaagcttttcgcatattcgctatggcttggcatagaggaattatttatggagataatggatggttatagagttgtctaaggcatttatgagtggccttaagacggctctttttttatttaagatgtgccagacttgtgtatgttgctgcagaaaccgtgtgaactctttttactggcaggtatgataacgctgtacgagacgcacgctatgcagaagaacagaaaaagacgtcggttagcttgttgcttgttgtgaatattttttgtctatgagtcttgacaaagttggcattggttattaaagttgcattagagaaactttattgtggacaggaaagtgtcctgtatttatgcataaagtaatgaatggagaatatatggctaaagggggatatgtcattgaataagaacatatggggaataagttcaataagtgcagctgttgtcttgcttgctgcaacggggtgttcagatggggcaggaggagaagtcgagccaagtgaggacgaccccattcaagtcgtcgctacgatcgcccaaattggcgagccattagaacgaattggcggcgattttgtggaagtaaaaacgattatgggtcctggggtagacccccatttatatgaggcgtcgcaaagtgatttgcaaacgattagcaacgccgatgtcattttttataatggccttcatttagaagcgcaaatgtctgacgtatttgctaatgtggatgtgccggcattggcgattggcgaagaggtggcggaaagtgaattgctagatgatgaagaggacgcttcggcgacagacccccatatttggtttgacgtaaacatgtggcaacaggcgattgacgcggccgttgaacaattaaaagaaatagcgccaagcgaagccgattattttgaacaaaacaagcaagattattttgccgagctagatgagctatacacattttcggttgagaagttaggcgaaattcctgaagagcagcggattttagtaacagcccatgatgcgttccaatattttgggcgtatgaataacatagaagtggtcggcttgcaaggtttaagcacagaagacgaggttggcatttctgacattcaatcaacgattgatacaattgtcgaaaaacaagtgcccgctgtatttgttgaaagcagtgtcaatgattcttcgatacaggctgtgattgaaggcgccggagaagctggcgttgacattgaattaggaggcacactttattctgatgcaatgggagaagcagggacagaggaaggcacatatattgggatgtaccgacacaatgtcgaaaccatttatgatgcgcttatgaatggaggcggccaagactaattaaatgatggcggattagtggcggagcgcaccaacaggagatgaacagaacatgaatgtaattgatgtccggcagcttagcgctgcttaccgaaaaaatacggtgttgcaaaatgtctcatttgaaatcgccccaggtacattgacgggcattgtggggccaaacggagcaggaaagtcgacgttaatcaaaacggtgctccaattgcacccttacttgtcaggagacgtaacttttttcggcgaaccccttaaaaaagtaaaaacgcggattggttacgttccacagcgaggctcagttgattgggactttccgacaaacgctctagatgttgtgctgatgggtctgtatggccggattggctggctgaaatggccgcaaaaaaaacatcgggaacaagcaatgcaagcacttgaaaaagtcgggatgactgagtacgcgaatcggcaaattagccagctgtctggcgggcagcagcaacgtgtgtttttagcgcgtgccctcgttcaagaggctgatctctattttatggatgagccgcttgctggagtcgatgctgctacagagcgagcaatcatggcgatattaaaagaattgcgtaaagagggaaaaacggttcttgtcgttcaccatgatttacagacagtcgctgattattttgatcacgtgctttttctaaacaagacggttattgcccatgggccgacggaagaagtgtataccgctactaatattgaaaaaacatatggcggcgcgatccacttcatgaaaggggatgggcgcaatgtcagtgctatcatccattaactttcaatgggtcctcgttagtgcggttttgctcggtgtcgcatcaggcatgttcggcacgctagcttactggaaaaaacaaagcttaatgagcgatgcattgtctcacgcagcgttgccaggcgttgtcattgcctttatgatcattcaggagaaacaattgctgtttttaattgtcggcgccgctttaagtgctttactaggcgcttggctcatttatgcgatccgttctgcgacacgcatcaaggaagatgcggcaatgggcattattttgtccgtcttttttggcggcgggattgtgttgttaacgattgttaaccgcactgctggtggcaatcaaagcggacttgatacatttatttttggccaggcagcgagcatggtgcgccaagatgtgtacaccatggcggcgctggcggcagcggtgatcttgctgattgtgattgcctttaaagagtggaagctctatttgtttgatgctgattttgccaaggggctggggctgcccgtacctgttatgaatgggctctacgtgtttggcctcgttacgacgattgtaatcggcatacaagccgtcggagtgattttaatggctgctcttttaatcatccctgctgttagcgcccgttattggacccattcttttaaagggatgatggttctctctgctgtttttggtggtttttctggcgcgtttggtacgtttattagcgctcaaggagcgggctggcccactggcccgttcattgttctttcagcaacagcttttttcctcgtttcccttgtatttggaaaagaaaaaggtttgtttactgaacgaatcgaattcaaaaagcagcaacgggatgcacgggcccaacatgatgaggaagcaaagcggattgcagcagaagggggcgggcagccatgatttcgtatgaagggtggattctcataaccggagccctcgttggcattacatgcggcatcgtcggcgcctacttaattttgcggcggatggcgatgatggccgacgcgatcagccataccgttttgcttggcattgttatcgcgtttctcattacccaaagcttagaaggcgttcatatgctcattggcgcgattggcgcagggatattaaccacatttctcgttcaatggttccattccaaaggggtcgaacatgacgcttccattggcgtggtgtttacgtcgctattcgctcttggcgtcattttaatatcaaccgctgtaggcaatgtccaccttgatattaagcatgccttaatgggagaaatcgcttttattccttggaatcgattgacgctctttggctttgagatccctgtggctacggccacgttgctgcttgtgttggcgatcgttttgttttttgtgctcgctttctacaaagaatggaaaatcacctcttttgatccagcattggccgtaagcctcggtttgccggtgatgttgcttcactatctatttatgacgcttgtctcaattacgacagttgcttcgtttgatgccgttggggcgattatggttgtggctatgctcattacaccggctgcttctgcctacttatggaccaaccgcttatcgatcatgctcgttttaagtgcggcctttggtgcgttgtcggctattctcggctattatgtcgccctatggctagatagttcgatttcagggtcgatggcgttaatgaccggtgctgtgtttcttgttagttttatttgttccccatcgcatggacttgtctcaagatgggtccggcctgaggagacaacgaaagcacaataatagaaggaagcccaagcctttttggacaatgaggtctgggcttttttgtgtttttaggcgaaaagcctgttaggaggggcgttggtggttttcctgcagttgtcggagcttccgcgtcaatcgggcaaactcttcatgattgcgttcatcgagtgctttatcgatggctgcgcggaggcgattgatttgattagcttctgatacgtagtcgagaaactgtttcgtttcctgctcatacatttgaaattgtttatatgttttgtaagggcgggataggggtgtatcaagcaactgtcgataaaggtggtttaaattccttccataaaaatggacaattaaataaaagggagcagatgggtttgtgacaatgtcgtcccacgcttttgcgacactttctgtcttttttgctccatagtagtacacaaatccaggctcatccgattgagtgctggcaacgatgagcgtacgtgccctaggaagtcgtttttcagtaaaatacaaatgttgtagcaagtggggtgttgatttgatgtggagaagcaaatctcgtgcatcgcgatgcttcaaatggtgcttgttcagaaaccattctaaaaattgttttttcagttgatcgctcaaggcacgctcctcctttttctgttatgggtatgtttatgtaaaaaaccgccctccatgcagaggacggccttttaagggcttaaaaagtaaactgggcgtcttgattggtcacagcgacaatcactttgccttgatcaagacgttcttccaattgttcagcttcatctgcagtaaagccaatttcttcaaatttggcccgaagctcatcgcccttactccggaacgtgtttttaagtgcagtgcctaacccagtctcagctgcactgattttgttagcgtcggcattatcagccacacgctctgtccggtcgtcgtcgtgagtgatgacataaatgtcgtcttcagatacgttctttgcttttagggcattgactgcttggacaacttcttcatcattgaaaaactctttataaacaggtttcatattgtatcgcctccctgttttttgcttaccccgctcttgaaatcttaaaacgtaggagagcaaaaatctataaagctggaggacgctgttgttttaaaatgcggctatcaaacacaaacggaccgaatggaattacggaggcgatgcttgccaacagcgcggttttaaaagaccaagcgcggctgaaaaaataggatgccacaaacagcatataaacaataaacaaaacgccatgtgccattccgacaatgcttactgcttcaggaatatcagcaaaatatttaaggggcattgccacaaacagcaatagcagcaacgaaatgccttctatataactaatccatttgaacatacgtgccctccttactctttcctttagtataacagcaagctgggcagtgatgtagcgtagaacgagaaaacatgccattttttgaaaaatggtcaatttttaagaggaggcgttgttccggtagcaagattagtgtccgccgaaaggaagagcgcttccttccattgaccggccttaacggaagtcgacaaaaccaatcagacagaagccttccctctcaaacagcttatcgattttgtctatggtatactacttaaaagaggtgagcaaatgaaagcctacgagaaaactgttacggttagtgataaagtagctgttcgattaaaaaagggacacccccttttccataaagatgattttcacttgcctgctgacgtccgcgaggggacgattcttcgcgttacagatagtggcggccgttttttggtccgtggctattacggaaaacagaatgtcggccaaggctgggtgctttccactaacaaagatgagtccattgacgtccgcttttttaaggggaaaattgaaacagctttaaacaaacgggctgggctttttgtcaatgaagagacaaccgcattccgtgttttaaatggggaaggagacggagtcggcggacttacaattgactattatgaagggttttttttggtaacgtggtacagcaaaggcatgtattcatttcgcagccaagttcttgaggcgcttactgcgtgtacggcctacaaaggcatctatgagaagaaacgttttgctagtgaaggccaatatgtcgaagatgacgatttcgtttgtggagagcgcggtcagttcccattgcttgttaaagaaaatggcatgtatttcgctgtttatttaaatgacggaccgatgacgggtatttttctcgatcaacgccacgtaagaaaacagattcgtgaccaatacgcgcctggagcgcgaatgttaaaccttttttcctatacgggtgctttttctgttgccgctgcgcttggcggggcagctaacacaacaagcgttgatcttgccaacaggagccgttcgaaaacagaagaacaatttttaattaatggcattgctgttgaagaccagcacattgttgttatggacgcatttcgctatctatcctatgctgaaaaaaatcggcttgagtttgatctggtagtccttgatccgcctagctttgcccgttcgaaaaaacggacattcagcgcggcaaaagactacacgcttttgttggagaaggcgctatcggtaacagcgccaaacggtattattgtggcctcgaccaatgcggccaacgttgaacggaggcgttttaaacaatttgtagaccaggcatgcacagccaaaaactgcagctatgaactgcttgaagaacatcggcttccagaggattttgccacttcgccggcctatcctcaaggacaatacttaaaagtgctcatcatcagaataacgggcaaggagtgattgaatgaagaaaaaagcagtattagccgaaaagccgtctgtagcccgggacattgccagggttcttggatgcaatcaaaaaggaaacggttatttggaaggaaacggctatattatcacatgggcgcttggccatttagtaacacacgcagatcctgagcattacggcaagcagtataaaacttggaaactagaagaactgccgatgttgccaaaacgccttgagcttgtcgtgatcaaacaaacagcgaaacagttccatgctgttaagcacgtattaaaccgccaagatgtaggagaagttgtaatagcaactgatgctggacgcgaaggggagctcgtcgcccgctggattttggagaaagcccatgtcaaaaaacctgtaaaacgattatggatttcgtccgttacggataaagccattaaagatggatttaaacaactgaaagacggcaaacgctacgaaacgttatatgccgcagcagcagcaagagccgaggcagattggtacgtcggaattaacggaacaagagcattgacgacgaagcataacgcccagctgtcctgcggccgtgtgcagacgcctacacttgccattcttgccgaccgggaggaagcaatccgcaagtttgtgccaaaaccgtaccacaccatttcggtcgaaacgaaagacggtgttacattccgttgggcggacaggcgctcaaaagaggaacggatttttgacgacaagcgggcaaaaacgctgcaagaaaagctgcagcagtctgccattgtcattgattctgtcaacgcaaaaacgaagcggacgcctccaccgcctctttacgacttaacggaattgcagcgcgaggcaaacaagcgctttggctattcggctaaagaaacgcttgctgctttgcaacgtttgtatgaacaacataaagcggttacgtatccgcgcacagattcacgctatctttcttctgatcttgtcgaaacgttgaaagaacgtctccacgctgttgatgtccagcctttccgcaaaatggtagctaacgccaaaaaacaagggcttgccaatgcaaaacggcaaatggtcaacgatgcaaaagtgtcagaccaccatgcgctcattccaacggaacaacctcagagcgcaagcgccatgagcgacaaggaagcaaagctgtatcacttgattgtgcgccgttttctggcaaactttttcccgccaagtgagtcagagttaacgtcagtagaagcgacggcaaacggagagctgcttcgggccaaaggcgaacgccttgtgtctgctggctggcgtgggcaggaaacaggtgaagaagacgaagcgttggcccgtttgttgccagctatgagcaaaggcgataaaaaggctgttaaatgggtaggcatgacacaaggcaaaactagcccaccgccacgttttaatgagggtacgttattagcggcaatggaaaaacctgcccagcatatggaagcgaaagacgagacaattaaaaagacgcttgcacaagctgggggaattgggacagtagcgacgcgggccgatattattgaaaagcttttctctagcttctacattgaaaagaaaggcaaagatttatatatcacttcaaaaggcaaacagctgcttgagcttgttccggctgaattgaaatcgccagcacttacggcagaatgggagcaacggctcgaaaagatcgtccaaggcaaagaacaaaaacaaatgtttattgcagaaatgaaagaatacgccaaagccgttgtcgcccaagtaaaagccgacaccgccactttccgccacgacaacaaaacaggtgaaaaatgccctgaatgcggcaaatttctccttgaagtaaacggcaaaaaaggaaaaatgcgcgtatgccaagaccgggaatgcggttatcggaaaaacattgcaatgaccacaaatgcacgctgtccaaaatgcaaaaagaaactagaacttcgcggtgaaggcgaaggccaagtgtttgcgtgtgtttgcggccatcgcgagaaaaaggcgcaatttgaacaacgacgtaaacaaaacaaacataaaaacgtatcaaaacgagaagtgcagagctatatgaagaagcaaaacaagcaagaccagtttgcgaattcagcgcttgccgaccagcttgctaagctaggccttaaaggcgacgactcgtgatttgatagggcaataaacccgcatgcagccgagaaaagcatgtgggttttgttgtacttctatttttacatagttgaaccactgcctcgcctctctttagccaatctttacgaatgttaacggtttatttgcggttgctttacatcggccctttatacttacaaatggagatcatttttaccctaatgggaggcgaaaagcatgaaacgttcaaagaaattggcagtggcagggctggttgggatcgtgtgtcttggagcgacctacacggcggcatttgcatcagacagtggggaagtaggagaagaaggcaatcagcctagcagtggacaagccaaaaatgtcatctttttaattcctgatggcttttcgcaaggctatacaaacaattaccgtttatacaaggaagatggcgagcctatttgggacgaacgcaacatgctgcgcgccttcgtgcaaacgcactcggcaaatgcagaagtgaccgattccgctgcagcaggcacagctttagcaaccggggaaaaaacgaataatggcatgatcggcgtaactcctgctggacaaacattgccgacaattctcgactcagcgaaagaaaacggcaagcgcacaggacttgtggctacatcaacgattacacacgcgacgcctgccgcttttgctgttagcgtagagtcacggaacagttatacagaaatcgcctcacaaatggtcgcaaacgatcatatcgatttaatgcttggtggtggccggacagagtttgtgcctgaagaccaaggcggtattcgcgaagatggcgtcgatttaataagcgaagcagaagaaaaagggtttgcatttgtagagacagcgcggcaattagcgaactggaatggtgaagaagaccgcttgcttggcttgtttgctgaagaagcactgtcgccggcagctaataaacggacggacgagcctagtttaggggagatgactgaaaaagcaattgaattcttgtcaaaagaggacaatgggtttttcttaatggtagaaggcagccaaattgactgggctggacacgccaatgacgcctattacgccatgacagatacggccgcttttgaagaagcagtcgaagcagcggtcgattttgccgatgagaatggcgagacgcttgtcgtcatggtcggcgatcatgatacaggggggatggccgttcacgcatcagaagaaggggatccgtctaagcttcatggtgtctctgctctagggagcgacatggctgcagaagtcgaacggaattatagcaacttaaaagaagtgcttgaaacgtacaccaattttgaatggacagaagaagaattggatcaactgaaagaaagcgactcactggaattagcgatcaatacggccatcagcgaaaaagcaggcgtagcctggtcatcgttagatcatacaggcattgacgtgccactgtacgcttacggcgccggggcagaacggtttaccggcacgatcgacaacactgaagtcccgaaaatcatgaaagcagcgctggggatttaaaccagttgattttcaagccgggaaagaacgtcctatagtatagaaaaaggatttaaggaagaaggggccttgtagctgcttcttcctacaatgattgtctcttcgttgttcataaaaaaacctaaaatgttctggggtttatttctatctcatgtttatacatcgtgttaaaaatagatataactatctttctctgatcaaaattccctctcaagtttcgcctcctcgctggatccattttctctttcctaagtacaccggttcgtataaatcgggagtactgccactcttactgtaacggatccttatggcttagttaaataagagattgtataaaggtacatcgttcttctataatcagtagaatgtattggagggatgatgggtgtttattaaacacattacatgtaaagtgaaaaaagaaaagaaagacgttttttctaatggtcaagctaaatggggttatctaaaaggattggaaggctttgtaggtcaaattggagggtggagtgataaacaagaaaatactgcctatatcttttctttatggcaagacaagaaagattatctacactttatgaagaacgaacatgacaaggttgcgttccttactggccaggaaggaagtatttcttctatacatatagaattatttgaggagaaatttggtatatgtgaaggcaatatcaatgattttattaatggaaattatattcgttttgccaactgtgatgttagggaaaatagaatggctcactttgaagagatgcaaataaaagtttggaataaaaacatggctcaagaagaaggaatgctaggtggttattttgctaaaaatacattaagtaaaagatacctcgtgttaacagggtggattgataaaaaggcccatacgaagtatttacaaaacacgtttaatagattgataaacgaaagtgacgtaaatgctgatgtatcgactatgtatggcgatcaatttttagtagaaaaatcttggctgtttatgaaatagttaaatattcatatagcagcaccgctgcagccagtgtcttgttgcgattgctttacgccagccaaggaccgataaatacactctcagagggacacaaggcttcttttcgagtatactggaagtaaatttgagttgaaagacagatactggaggttaaaacgtgtccatcgaatcagaacacgatctcatcgctttacagaagattggccgtatcgtggcaatggcccgtgaagagatgctatcctctgtccaggctggaattacaacggcagagcttgacggcatcggcaaaagggtgttggatgagcatggagctgtctccgcgccttatattacctacggttttccgggaacaacgtgtatctctgtaaatgaggtagctgcccatggcatcccaggccctcgggtgctgaaggaaggggacgtcgttaatattgatgtgtcggcggagctgggcgggtattatgctgacaccggggcaacgacagtggtaggatctcgctcgccgcacaaggaaaagctatgtcagagctcgcttcgtgcgctgcaccaagggcttaagaaggctaaggcgggtgcgaggatcagcggcatcggacgggcgattcacaacgaagcccgcaaaggtggcttcaccgtgatccgtaatttggccgggcacggcattggccgcaagttgcatgagatgccagacagcattttgaattattatgatccacgagacagcaggttgctcacgaacgggctcgtgctcgcagtggaaacttttgtatcggatggggcggaatttgtagacgagggcgctgacggttgggggctgctgctgccagagcatcattatgctgcacagtttgagcacacgattgtcattaccaaagataagccgcttattttaacagcgtaacgttattttcgagcttaatcatttggaaaaacggttgtccttaagaaagggcggctgtttttttacgaaaaggccaataaattctcatcactaaaaagcttgccgggcatctcgcgtcggcaagctttcgtggttgctttttatggtgcgtaaatccctaaagcatttaaaccaatggaaggagtgtttatttcttcgataaattttcaactagctcttttacgtcaattccgctagacgcttttaaggactcttgcaagccagccattaagtcggtcgcgtagccagttactttgttagcgccgctcccttggccgcctgcgccggtatcgacaacggtaatcttatcgatgttcgcgagcggtgctgctacttcgcgagcataatcagggagcatttcgattaacatgctaagtttagcggcttctccgtatttttcaaacgcttcggcaattttttcttttgcttccgcttctgccagccctttaagacgaatgacttcagcttcagcttccccacgtgctcgttcggcttccgcttctgccagcccgtcaacacggacccgctccgcttccgctttcgccattgcttcaacacggtatttgtctgcatctgcttcggcaagttgtttgcttttttgcgcggcagccgcttgctcgacggaataacggtcggcgtctgcttttttcttgacttcagcgtcatactgccgttcgcggcgggcaatttctctttcttcaagctcgatttgcttttgccgctcaatgatttgaatttgcatttgctgttccgttacttcctgctttgaacgggcttcttgcaaatggtaggcttggtccgcttgcgcttttgcctgttcttgctcgctgcggtacgcagctactttcaattggttgttcttttccgcctcagcaatttcagtggcacgttcaatctcggaacgctgcgcctccatattggcatttgcctggcgaatgcgtgtttctttatcggcttcagccgtggcgatgtctgcatcacgcttcacttgggcgatgcgcggtttcccgagtgattctaagtagccgttggtatcacgtaaatctttgattgtaaatgatacaatgacaagtcccattttggccaggtcttgagaagcaactttttgcacttcttgtgaaaaccgttcgcggtttttataaatttcttcgacagtcatcgaacctagaatggagcgaagatgcccttctagtacttcttttgcttcttgttcccggtcatcccgagttttgccgaggaactgttctgccgcagtcgcaatttcgccaatggagccgccaattttaatgatggcggtaccgtcggcaatgacaggcacgccttgttcggtataaacttctggtgtttgtacgtcgagtttgctcgacaagagtgaaagtggttttgcttgctggaatacaggcatgacaaaggttccgccgcctctgacaattttaatgcggttcccagcctcatccatgttcacatttttgccgccaaggtagctgcctgtgacaatcaatgcttcatctgggcctgctgttctgtagcgagttacgaacacgccgacaagcacagcaagaataacaaggacaattccaataataatcatgatttctactgccattatatacctccaattaatcaagtaatggatctgtcaattcggagacgtaagcgatattgttttcgattttcataatgaccgccgtcgccccagcggaaatcggtttcccgtccatgcttgtggccgttttggcaatggtgccgctgtcgaggcgaacgacgatttcgccgaagccttccgcagggatcgagagaatgatttcgccgtattccccttctagatcttcctcgctgtatgccgtcgattcctccgtatgctgtagcggagttaaaataaataagttaaataaaatggcaagcatagaggcgacgactagactaatgcctgcgctaaccacgctggataagggcgaaaacttttccagtaagtacgcacttgcactaaaaaaactgatggcagatagcacaaatgctggtgaaagccaactgtcaaaaatggcaatactatcaaaaacatctgaaagcaagacataaatgatcgttacacctccgcttacaagcaaaaccgtcagatacagcgtatctagctccatgagctgccctcctttctattctttatttatcatgatatacgaagttcttttggaaaaggtttcagttttaaatcagtgaaccgctctctaataaagcatagttcctataccttgttcatatactgaaatgtatgttttcggatttattcccatgcgggcaggtgagggaacgatgccagaaatggatgagaaagcaagagaagaggaagcaaggcgttcagaagaaatgatccaatttgctgaagatctgatttactacgctgcgattatcggcggaattgcgacggcgatggaccttgttggtttaacaatagcacgagaggaagcgcgaagagcagaggccgcagctgaggaggaaatggatacggcgtttccgcaacagccaccagtcggttttactgagtctgggattcggagagacggccaaaacggcggaggaaacccttctagtatgcaaaagaaagttgaagatatggagcgtgaaatgaaacaattgcagtggcaaatgaagcggatcgaaagcatgctccatcgccgctaaaggatgaagaacgtaaaaagccatttaagggaggactcccttaaatggcttctattctttttttccaagcggttttttggctggcccttcaatgacatcgcctgtataagaaaaacgtgagccatggcatggacaatcccacgtattgtctgcgtgattccaatttacttcacagcccatgtgggtacaggttgtatcgacgaggtggagtgtcccgtctttatcgcgataggcgcctactcgctcgccgtctttgtcaattacggctccctccccagcttcaagctcctcaacatgttcaatatcctgatgtagttttccgcgaagcaaatgtttagccacgtctgcattctcttttaaaaaggaacgaatgcttgggtcggcatggaaccgagatggcttgaataattggctgtataagctgttgccatccacaattaaatcgcacaaaacatgtgcggccacagctgaattggtcatgccccatttcctgaacccagtggcaacaagtacgtccggttggagggcggacaattggccaatataagggagcttgtcaagtgtaatcaagtcttgtgtggcccattgatcttcttgtgtaaacccttctaatgtctcggtggcgaattgtttaactgcctcgtaatgtttgagcgcattcattccttgtcctgctttatgcccttctccgccaaccaaaatcatttcttcgccgtttatcgtagcgctgcggagagaacggcttgtttggtctacacttaaatacatgccgccaggccaaggttttgcgtatgtgccagcaacgacataggatcggtctgcccgcaagcgtgtcatgtacaagccgcctccatctgcaaaggggaagtgtgttgccgcgaccacttttttagctgttgctttcgcgccgcccctcgtttgaatggccgggcgtttatcattgccttgaacgactttttcacaaacagtattttcgtaaattaggccgcctttttcggttattttttggcataagtaagccaaatattggagcggatgaaatcgtgcttgaccttttaatctcagagctgcgcggatttccaaatcaataggcagcgacgtgagccactctcctggaatgccgagttgtttataggcttctagttcccgcttgagtttatgttccccatggtgggttgttgcataaaggtagtggtcttcatcttgaaaatcacactcgatgttttggttgttgacgagattgcgcatccagcttatcgcttcgtcttgcgctttgtaataaagctttgtttgttctttgccaatatggctcaaaaattcgtggtaaatcacatcatgttgggctgtgatctttgcggttgtgtgcccagtcgtgcctccgccaattttagttgcatcaagtacagcgacctttttgcctgcttctgttagtaaataagcggtcgtaatgccagtcaaaccgccgccagcaatggcgacatccacttcgatgtcctcttgtaaagcggggaagttaggaaaatctactttttgccaaacagaccctaaatttaattgttgttcactcatcttttcgtcctccattttcttgtctgttatcactatggtcatgtttcccagattttatgaggaaaaagggctatttttagttttgcgaaattcgccatttgcaacctgggcctgtctgagctactctttaagaaaagaaatagaaagtgagtttgagaaaggagacactgtgaaaaaacaagttgagaacgggcttttatttgcatgggtgacagctttagttgcaacgcttggctcattgtatttctcagaaattcgccagtttgaaccttgtgctctttgctggtatcaacgaattttaatgtacccgctagttgtccttttggcgataggcatcattcgcaaagattcaactgcagcgatttattcagctgttcttgccggcattggcttctgcatatccgcttatcattattcaattcagaaacttcccgtgcaagaaggcaatgtgttagggtgcggggctgtcccatgtacaggagaatatattaattggcttggctttataacgattccttttcttgctggaattgcattcttaatgatttttttaacaagtatgtatatcattcgaaaccgctaggagtgagacagacgtatgaagaagttactgattattggcgcaggcgtactagcgttgttcattgttcttatcattattcaaaccgttaataacaacaaccgtttagcaaataacgacctttatgataaagatgacttaaatgcggcgacaattgaccagctgaacgatgaaaattaccaaaacattattatgcctgatgcgttggcagaaaaacttgaagcgggagaagacgcagttgtttactttttctctcctacttgccagtattgcaagaaagcgacgccaaaactaatggatgtggcaggagaagaagacatctatattgaccaattcaatgtgctagagtacgatgattctgcttatggcattgaatatacgccaacgcttatttattttgaagacggcaaagaagttgaccggattgtcggcgaccatacgaaagacgagttccgtacttttctcgaaacgacaaaagcgcagtagcatgtgatcaaatcgatctttttgggtggcaatcgatcaagccgcccttcttgttgtcttctattcgctcttgcatccatattctgtttatggtatgatatttctttgagaacaacggagcgccttttgtgcgatatgcgcttagcgatagtgcgtctatgtaagaaagcaattgatcataaggctgtctcgatgttgaaagcgagcctagcgactggctttttgcatccaggcagccttttctaagtacgaaaggcgttcaatctatatatagggagtttttatcacttggcaaattttgaacaatttggcttggatgcttctgtcgtccaagcagtaacgaatatcggctttacggaagccacgccaatccaacaagagacgattgagctcgtactcgcaggcaaagatgtgattggccaagcccagacaggcactggcaaaacaggtgcttttggcattccattagtcaatcgcattgactcaagcaatcctcttgtccaaggtcttgtattggcgccaacgagggagctagccaaccaagttgagcaggcattgcgtcaatttgggcgtgtcaaaggtgtacgcacaaccgttgtatacggcggtgaagactttggcaaacaaatccgctccttgaaacagcgcccgcacattattgttgctacgccagggcgtttgcttgaccatatgcgtcgtaaaacaatccgccttgaatcgattgaaacggtcgtattggatgaagcggacgaaatgttgaacatgggttttattgaggacattgaaacgattttggcagagacacctcaagaaacacggcaaacattgcttttttcagcaacaatgccaaagcggatggagtcactagccagcaagtttatgaaaaacccaacacggatagctgtgaaagcaaaagaagtgacaatggaaaacattgcccagcagtttattgaagtccatgaacgaaaaaaatttgatgtgctctgccgcctaattgatctagagacgcctgatctttccattgtgttcggacggactaaacggcgcgtcgatgagctagcggaagctcttattaaacgaggttaccgggctgaaggcttgcatggcgatttaaaccaagcgaaacgtaacagcgtcttgcgcaaatttaaagaaggtttaatcgatgtcctcgttgctaccgacgttgcagcgcgtggccttgatattagcggcgttacacacgtctttaactttgatttgcctcaagatccagaaagctacgtccatcgtatcggtcgtactggacgagcgggccgttctggcattgcgattacgctggcaacaaaaccagaacgtgagcacgtcaaattgattgaaagtgtctcgaaaagacggatgactcagcggccgaagccgacatatgaggaagcgcttgaaggtcaaaaacagtcaactttaaacgaacttcgtgaattggctgcaaagggcgagcaagacagctaccgagtagcagccaaagaactgctccaagaaacagatgcagtcacggccttggcggcggcgttgaaattgctgacaaaagagccagaccaaacgcctgtgaaactcacaagcgaagcgccactgcgtacgaaaaagcgccacggaaatgggggccgtgatggccgccgtcataatgatcgcgatcgtcgcccttgggggcaaaaacggggccgcgacggacggcgcagcggtcatcaacggaagtgggcttcatcgaacggcaaggcaggcaagcgtttatcgtaagtgcataaacgtctatgaaaaggtcaatcacgatgcatgcattgttgatgggcctttccttttgtttaggcaaattgtctattcacacaattagcaaaacgaaaggggccgcgcccattgctcttcggtccgttctttatttgacaacagccggactcttgtttctgttcgctcaaatccatttcgctgatagagctttcgtgccgctgtgagttcgctatttgtccacagaatcacgttctcataacctgcttctttgcaaaaatcaattgctgtttccagcaacttctgtccgtagccacaccctcttgtagaagggtcaaggagaaacaaaccgagctgtgccgtgtcatcgtccgcctcttttatactaatggagcctttttgtttgccgttgatctctaaaatccagatgttttctcgaggattggacctgtccataaaccccgttacactgtcagcaataaaatcacgaaacgataagtcatattgaaattcgttgtgatacaacttgtaatgtgattgaatgatgtaatctttgtccgctggtttaaatgtccgtatcatcgtacccctctttctgtgaatgttctttactgttaacatagcactaaaaatagaacgagacaaaaggtttcccgttgcttctttccagatggtcgattattatatttttggcaaggaacatggtacgataaggatgaaacgaatagacgaggacatacgtaatacatatgtaattaactaaacatgaaagggtgtcaaacatggtgaaacgaactggggaacgtgttcttggcattatcggcatagtgtgttttatgctcggaacattgtttttaggaggagctatggcactccaaggccaaggcttctatgaagacttttttatggaaatggccaatgaagatagtgagctatgggaaggagaagaaaacccgcctatagttagccaagaagatgctgctgcgacttctgcgttttttgaagaactcaattttggaatgtacacacttgcttcctttatagcaggagttgctgggattgttgcggtggtcctcgttggcaaaaagcccgtggttgcaagcatattgtttttagggtctacacttctttatgcgattatggccccttttacgcttgcattcatcatcccattcctgccaatgctgttgtatattattgctggaattatggcgcttgtgcgcaaaccaaaacagccagagttgaccggacagtaaaaccatccaattggatggttttgccattattatctgaatattagtgtgtcagataatctgacaaatcgattgcataaaggggagtgtcgtcataaagtagaaaacaagaaaaagatgaactgttcatctactttaggggagtgttagagatgacgacacaagcgccaactcgtgaaagcttaattgagacgatccgggaaacgattgaaaagaaaaatgtcgagctgcttcatatgcagtttgttgatcttgaaggcatgctcaaacatgtgacgattacggcagagcaattggatcaagctgtgaacggcaaaaccatgtttgacggttcttcgattacaggttttacaccaattaaccaatcagacttgtacttgtcccccgacttgacgacgtttgccgttcttccttggacggaagaagaaggctactcagaagcacgttttttatgcagcgtgaaaaatcctgatggctctgattttgagggcgatccacggaacattttaaaaaaaacggttaagcgtgcagccgacaaaggctactcgattagcgtaggcccagagcttgagtttttccttttcgacacggatgaacatggcgaaccgacgatgcgtacgcaagacgctggtggctattttgaaccttctccaaaagacgacggtgaaaaagtgcgcctcgcgatttacaaagcactgcggatgatgggcttcacgattgaagcttctcaccatgaagtggcagtcggccagcatgaaattaattttaaatattcggatgcgttagggtctgccgatgcagcaacaacgtataaatgggttgtaaaaacagttgcgaaacaatttggcctccacgctacgttcatgccaaaaccacttggtggagcaaacggaaacggcatgcacgtcaatatgtcgttgttcgatatcgaaaagcaagaaaacagtttctacaatgaagacgataaaaatgcgctttccaagacggcctatcactttatcgcgggcttgcttgacaacgtcaaagactttgtggcaataacgaatccacttgttaactcatacaaacgcctcgttccaggctacgaagcaccttgttacatcgcttggtctgcttccaaccgttcggcgcttgtccgcatcccggctacgcggggccctggcactcgtgtggaaatccgttgtccagacccgtccgccaacccttatcttgcttttgcggttatcgcctctgctggattggacggcgttgagaacgaaatcgaatgccctgcgtctgtagatgctgatattttcagcatgtcttccgcagaaattaaggagcgggcgattgagaacttgccaacaagccttgaagatgcgattaatcgttttgaaacaggtgctattggccgcaaaactcttggcgatcacgcgtttgaagaatacattgaattaaaacgcagcgaatgggatgacttccgtacgagtgtgcatccttgggaagttgcctcttaccaaagcaagttttaattcgccaataggggagcaatgggctcattccaaaacaatcccgcaccacgcaagcagtggtgcgggatgtttgtgtccgcaataatacctttttcgtatgtctattgtctgcttgtccagcaaggctgttaacgcgtaggcgacctgagccactaacgtccaattctcagtacgcttattctgcttttttagttggccgattttctcggaaacgtaatccgcaaatatcctgaatgacactatagaaacccggtaaaaatgatttaaaaaaaccggtacaatgatgcgcttctctatagctctcattctccattaagatcgtgtgcgctttttttaaacgataatggggaacggctggaaagagatgatgaaccagatgataattgtcgtgatgaggatggagaaagaaacgttgtattgggttcccaaacgtatttctgcttgaataaagctcatgtgtgttttttaaacctgaatgttcagccatttccgcccagtagcgtataatttgaaatgtggtcaataaaggaataaaccaaaataggaaaagctctaaccaaaaatcaaacaccacacttaatagcacgataactggccaaaataaagacttcgcgactttttcagagattggttcttcttttgtcaaaatattaactttaatggtcccgtaaatgtatttagggacgtgggttaacgttaacggttttaaaacatgtctaaggatgaatgagcgaatgtcgtcttgtggtttatctaaccccattaacgcatatcgtttcgtatctggatctttttgctcatgccataaatgacgatgatgcaaataatgggattgacagtaggcagtaaacgaagtaaacaccggaaaagctacaaaaaaacaggcaatccatttattcattattctattcttaaataattgaaaatggctagcctcatgcataaggttgtcaaatgccctcattctacttcctatgatggctatagatattaaatacacccaccacataggaaatatttgaactaacgcaatcgctccaataatgacaagccagtcaaaagcaatcgtgaacaaattccgccagttatctcgttcctggagggctctcactcgatttttaatatcttttgaaaaagtagctttttccaatttgtgttccattcattttcctcctctcactgccaattttcacatgcgtgtcgtcaatgccttatattttatcaagcgcttgggataagtcgtctcttatatcttcatattcttcaattccgacagaaaaccttatcatgccatctgtaatgccgcctttttcacgttcttctctcggcaataaattatgcgtcatcgacgctggatgggtaatggtgctcgcatacccgcctaaactgacagccatcttgtttagtttcacgtttgaaatcaagccaagcccgccatccataccatctttaagttcaaaacaaatcatgccaccgccgccagtcatttgtttagtagctagtttgtattgaggatggctttcagaaaatggataaaacacttgtctaattttcgggtgtgtctctagaaattgagctaatttcaacgcgttttcgttatgcttttccatccttagcccaagagttcgaatacctctacatagcagccacgctccaaaagggtctaggtgcggaccatggaaggaatatttatggcgaactttatcgatcaactccgttgaaccagcacatacacctgctacaacatcagaatgcccacctaaatattttgtggcagaatggacaacgatatccgcgccgtgcttcaacggtttttgattataaggtgtagcaaatgttgaatcgactacaaagaccgcatcgctttgttcatgaacgagcgtagctactttagatatatctactaaacttagagttgggttggcgggggtttcagcaaaaactaacttcgtattcggttgaatcgcctgtttatagtgatggatgtcactagagtcaataaacgtgacatcaacagataactgctctgctagagactcatgtaatattttcgtttcagagtaacagttatgaacagcgataaaatggtctcctggatttaaaaatgcatgtgtaatcatggagatagcacctaatccagaagaagcacaaagcgcatcgtccgcttcttcgagggcagcaatcaaagcttctaactcacgttcatttctgctcccccacctgccataaaattcatcggccttaatgtctgctgcccgaacggcgccttcggaagtagtcgggaattcgaaagcagtggactggcaaataggaggacttaaatggcctgatttattccaatgatcccctccatgtgtacaggctgtttgaaatcctaaacgatttttgcttgtttcgattccagtagcgattggtttcatgatctttgctccttttcaactttgggatagtgtacatcacacaggcctaataaacattgtcatagttggtacatcggcttttgtttatccaaactgaaaaagtcgattgcaacgtcattttttgagaaacggcttattaatttagacagatcggttaacgccaattctgctctgttatcgcccccttgtatttggtcaacaaaaaagacaacatttttggtcttgttcgtaatttgagtatgatccgcatcacggtggttccaatagacacataagattgatgttgcatctgaataggcaactactttttcatctatttgtataggtttatcaccgcctataggaagcatttcttcgccttttctcccataccttaaagaaatactcccggtaatgttgtctagatcatatcctcccatacacaaacaatgccttaaagatacagcattgtaggcatcgaccaacttattaataccgaataccttttttcctttagacactcttttatataaactttcaaatgaacacaatactttgctcggttttactcccatttcactgtaaacagatctccagctttggatttcgctctttgctaatggactgtctgtgttttcatgctcatctacggtacgattcagataacgttcaagctcttccgattggtctgctgttctatcaatcccttttactaccaatccggaaatagtcaagccagggtagcttgtgagcactttatcggaaatagcaatctctaagttagccaacgctttgtcctccattttcagttaagttattttagctcaggtagactattactaatttattaaaatgtcacatagttctctcttctattattctagtatttgttgggtataacagtatagtttgatgtataacagttaaacgttccttttttggcatgtttgctactggatacccagcaaaaatagccattcagtgactgaaagtctacagaatgacttggttaaacaagaggcatgtttgattcttcattgcgttcttcaataaaggtcgtaaaaattttacaaagtgtcttgatgcccgtttctaataattgatcatctacagcagcaaaacacagccgcaggtgattcatggcaggttctttaggatagcaagcagatccagggagaaaggagataccaaatttctttgcttcaaacagcatttcattggtatcgacccaagggggcagcgatatccaaatattgactcctccttttgggacaatccacgttacttccttcggggcatatacagtaagaagatcgataacgcgatcccttcttaattttaaagcgatccgcagcttttttatatgctctttcattcgattcgaacgtaaaaaagacagcaccgccttttggtttaatagaggagtgcctaaatcggtaatagttttggcggctatgattctgttcaaattcgtaccagaagtagccatcaccccaattcgacaccctggagacagcgttttgcttaatcctttcaaataaatcacatgaccatactcatctaagctttttattggcagcgggggtttactgtcaaaataaatttcactccaagaatcgtcttcgattataataatctcgttcgattgcgcaaaatcaagcagtagttgccgtcgctttttactgagcaatgttccagttggattttgaaaagaggggattgtataaatcacctttggtttatttttcaatgatggcagtaaatccactctcattccgttctcgtcaactggaatcgatacaatcgatgctcctctccctctgaatacgtcaattgccgctgagtaagtaggagtctcggtaaccacaacgtctcctgggccaacaaaactacgggcaacaatatcaatgccttgttgaaccccatttgtaatgacaatatcgtctggttcaattgctatctttaaatgttttaaataagcggacatttcttttcttagcgtaatgtctcctcgtccttctccataagtagaaagtatataaggttcctccgaaaggatctgtattgtttcttttatgaggtaacggttcggaagtaagttgggccatatcttagaggaggaaaactggattttttctttccctgtattaaattgcatgtactgagcacgtggcaagtaatcagtaaccgttaattgccaatcataagatagcagctttttttcgttttccgttttgcttgtcctgctattttttcggacataagtccctaatccttggactttttcaatcaacccttgtttctctaaatggttataagctttatttgcagtcataagacttactccagtttgttctgctagtttacggacagatggtaacttgcttccttcttcgagcaagttggagcgaatccggtcagcgatgttctcttgaatttgttgggcaatcggtatgtcagaatgccgatttatttctattttcaaaaaaacacctccatctgttatgtgtgtttatttactgttatacagtcttattctaaaattagtttaaatgaattgtaacatataacaattgacaggtggaggaagtggagaacaaaaaatgaaggcggaaacaaaagacaatccttggcagtctacagaaaaaaaagcagcatttatggatggcgtctatgcgtgtgtacctacattgttaggttatttaagcattggttttgctgcgggtgtcgttgcaaaaacggcaggtttaagtgtacttgaaattacattaatgtcgttatttctctatgctggttctgcacaatttattgctgcaagcatgatcggggcttccttttcagtcattgccattgcgattacgattttctttataaacattcgccatttgttaatgactgctgctttagcaccttatttaaagaatctttctatcgggaagaatatattgattggtgcacaagtaacagacgaaacatttggcgtagcagcaaaccgtttaccaagtatgaacggaaaccggttttattggatgctcgggctaaatataacagcttacatcaattgggtattagcaaatgtgctaggaggcctatttggtgaactggtcacggatataagcgcattaggaatcaattttgctttgcctgccatgttcgcgggtttgttagtattgcaaatgatcagtcgttcgaaatatgccattgatttaaccgttgccttgcttgccattgtgttggtgattggtgttcattacttgatcccaggaagctggtcggtcattattgctacgttaattgcgacgactatcgggatggtgataaaacaatggaaataaattcgtatattttattggtcattatagccacagcacttgttacctttatcccacgagtcctgccattagttgtactgactagaatggagttaccagcgtggttattaaaatggcttgattacgtgcctatagcgattatcgctgcattactaggtcaagaaatcttcattaatcaagaggggaatatttccttttcgttgtataatttaaatatttacgccattataccgacttttttagtagcgatcatttcccgtagcttattagccactgttttatcgggggtgttcaccatgatgatcttgcaatatcttttttagtctgtcgacttatggtgaggctttcagttaccatccaaagcacgctattttctaccattgacaattggaccatgtaagcataaactgtatcctaatagtcggaacttttggagaggatcttatggcgatgccacagaggctcaattccatacatcgcctagcctgtcatgtagggcacagaggctgccgctttttgaaatcaccggatttcaaagcggcagcctcttttttgtggcctttagtctaatagaggggtgaagatatggttattttaacagggcgttcgttgacgctggatgacatggaagcgattttgtacaaaggggtgaaggtaggcttaagccaatcgtgcattaacgagattgaagcaagccgtcgggctgttgaaaagatcgtccaagacggacgaaccgtatatggcatcaatacggggtttggaaagttcagtgacgttcaaattgccgctgccgatacggaggagcttcaacgaaacttaattttatcccatgcatgtggggtaggcagttatttttccgatgaaatttcccaggcaatgatggtgctgcgggctaatgcactcgcaaaagggttctccggtgtccgattagaagttgtggaaatgctgctcgagttgatcaataaagatatttatccgtgtattccttcacaagggtcgctcggggcgagcggcgacttggcgccattatcccatctagcccttgtgttaatcggagagggagaagtccgttatcgcggcgagtgtatgagtactgcatcgtgctttgctaaactcggtattcaacctcttacgctgcaagcgaaagaagggttagccctcataaacggcacacaagcgatgacagccgtcggggttgtcgcttacttagaagcagaaaaattggcgtatcaaggggagcagattgctgcggtgacgatggaagggcttcagggcattatcgatgctttcgatcaagccgttcatgttgctagaggctaccaagaacaaatagacgttgctgcacggatgcggcatcttttgcaagggagtaaattaacgaccaaacaaggggagaaacgggtccaagatgcctattcccttcgctgcatcccccaagttcacggcgccgtttggcaagcgctcggctatgtgaaggataagttgcttattgaaatgaatgccgcgacagacaatcctcttttgtttgatgaaggggagaaagtgatttctggcggtaactttcatggcgagccgattgcgtttgcgatggactttctttgcattgcgatggcggagcttggcaatattgcagagcggcgcgtcgaacgactcgtcaatccacagctgaatgatttgccgccatttttaagcccggctcctgggctccagtcaggggcgatgatcatgcagtatgttgcagcctcccttgtctcagaaaataaaacgttggcgcatccagcaagcgttgactccattccatcctcggccaatcaagaagaccatgtcagcatggggaccattgccgcccgccatgctttgcagattgtcgaaaatgtacgccgcatatgcgcaattgaagcgatttgcgcgctgcaagctgttgaatatcggggcatagcggcgatggctccagccacaaaaaccttttttgtagaggcgcgccgagttgtaccaacgattacggctgaccgagtatttgccaaagatattgaagcgatggcacagtggcttcgcaatgggggaaaagcagcagcagtgcttagttaagaggtgaaaaaaagaagcagggatggagccctgcttccagactgtagccaaacgctcgcgtacgtcgtcgtttgcctcactcatatgcttgaaactgtcgtatcatgcgcaagaaaaccgctgctcatgaacccacgttctatttgcatctttcctcggctgcactcctcgtctgacaagcgctttctatcagtctgaatgattttgttgagactggttagttttgtttttcgtggcggtaggcgccgtgggcaacggaaccgacgtattcgttgagtctgctgccgtgcttgatcgcggcagtgacaaagtctttcgctgtgtggatcgcttcctcaaccgatttgccttttgcaagcatagcagtgatggctgcggcaaacgtgcagcctgctccgtgcgtgtaggtcgtatcgatttctggatttttaagcaatgtgaaagactggccatcataccaaacatcaactgcttgcgggtggttaagcttgcttccacccttaatgacaacatggtctgcgcctagttggtgaatcgtttgcgctgcacgtttgacatcgtcgagtgtttcaatacgttgcccagaaagctgcgtggcttcaaacaagtttggcgtaacgacaaatgcttttggtacgaggacatcgcgcaggcatgcatccgtttctggattgagcgcttcatctgcgcctttgcaaaccatcactggatcgacaacaaccttgttaacgccatactcttcaattttgttggcaacaagttcaatgatttcaatcgatccaagcattcctgttttaaccgcatcagcgccaatgccttttaacactgtgtctatttgtttgccgacgagtttggcatcttgggggaatacttcatgggcccagttttcaaacggattttgcgcaacaatagtcgtcaaggcattcatgccataaacgccaagttcttgaaatgtcttcaagtccgcttggatgccggcaccaccgcttgtatctgagccagcaattgttaatgctttataacgttccatttttctctctccttccttgtccgtgctttccattatactaaagcatgggcgtccttaaaagcagtggcgcttttggaaatgatttccctttactgagatagacctcctgtaaaaaatgtaatagcctggagagggatagttgtgtataatgattcatgttatcttattcttatccatttcggaggtccttttatgggaacgaaagtaaatgtaaaaaatacactgctgtttgtactgccatctctgattggcattgtgttgtttatgactccttttacggtggtcgaagaaggcgaaacgagtgttaagctgcccgtagcccttgccgctgattggctaatggcgcttcttacggtagacacgattattttaatcacggtcatagcgatggtcatttctgcgttgttatcgattgttttttccgtgaaaaagagaggcaacgagattaaaacactttgggaaggcgttttcgcaaccactcctgggtggatcgtcattcgtgttgtcggagctattttaggagtgatggtgtacgtccaaatcgggccccagttcctgatttccggcgacaccggccaagtattgttgaacgatctattgccgtttttgtttaccatctttttatttgctggcatgctgttgccgcttttgctaaacttcggtttgatggagtttgtcggctcgttgttgaaaaacttaatgcgcccgttattccgcttgcctgggcgtgcctcgatagactgtattgcttcttggattggcgatggaacagtaggcgtcatgctctcgaaccaacagtacgagtctgggaagtatacacaaagggaagcagcaattgtcgcttcggcattctctgttgtttcgattacctttagcatttatattttatcgcaactaggcattagccatttgttttggcagtttttctttactttgtttgttgctggttttcttgcagcaattatcacaccgcgaattccgccgctttctcggaaaaaagacacgtatattgatggctctccaggaaaacgggagccaaaagtgaaaggcgtctggaagcacggtttttatgaagcgatcagcagggctgaaacgagcgccaaaagtggtgataacgcaaaaaatggtttcaaaaatgtgttggacctctggtttggtgtcttgcctgtcgtcatgacgattggaacgctcgcagctgcagtggcaacctacacgccactgtttgaatggctggctgtgccttttattccagtccttgaatggatgaacgtgccccaggctgccgaggcaagcaaaacgattttagttggctttgcagatatgctgttgccgacagtccttgcagaaccgtttggcatcaccaatgaatttacactgtttgtgatcggcacactgtctgtctcgcagctcatttatatgtcggaaacagggggcgtcttaatcgcttccaaaattcctgtcagctttttcgattgtgtgttgctctttttagttcgcacgatcattacattgccgattattgtgctcatggcccatcttctgctttaaaacactcaaacggctcgtatggccagcggaacttctccgctggtttttgctgtttggcaacattggccattaacgttatgatagatacagagacaactagatgaagaggaggaactgaacatgcctattcttcgtaacgattggaacgatgtgattggcggcgaatttcaaaaaacgtattacttagagctgcgtgaattcttgaaacgagagtacaaagagcagacggtctacccccatatgaatgatttgtttaatgctttccactatacgccgtttgaacaagtgaaagtcgttattcttgggcaagacccttatcatggcccaaaccaagcccatggattaagtttttctgttaaaccggaagtggctgtcccgccatcgctcaaaaatatgtataaagaattacaagacgatttgggcgttacgcctgtagaccatggctatttacagccgtgggccgatcaaggcgtgctattgttaaacactgtgctcagcgtccgtaaaaggcagccaggctcccataaaggcaaaggctgggaactgtttacgaacgaagtcattcacgctttaaataaacgggaagaaccagttgcatttgtgctgtggggaaggcatgcccaagcgaaaaaagaggcgattgatgcaacacgccatttgattatcgagtcggcccacccgagccctttttctgcaaatcgaggtttctttggcagccgcccgttctcaaaaatcaaccattggctgcaggaacagggaaaagctccggtcgattggcagctgcctatgaaagcagagctctattcttatgggaagtaaactcgtttttcttgctgtatcttttgccgttggctgggtggtgcaaatgcttggcatgccggcaggttggttgcttggcgctttagcaacgggcatattttggtctttttttgtccaaaagctcatctttaaaagcgaactgttcactgtttcacttgcgttagtcggcatttctattgggtttatggtcattcccgaggagctatgggcatacagaatgttgctgcccgcttttttactgacgttggcattgactcttgcaggggggatcttacttggaaaaggctttgagaagtgggcgcatacgacagggaatacagcattcttttgctgcctgccagggggtgcctcagaagtcattgctttaagcgagcgttaccacgcagaccagcgcattgtggcggcattccatacaactagaattacgttgtttgtgctcgtcgttccccttctagtcggcctcgctacaggaggaggcgtgtcgctgccagctgcagtgacacagccatttgcagcagatgcctggcttgtttttctcgcgttgcttggtgcagtggtcatcttttgcttagcacgctttgtcacgtttccaggagcgccgatgtttttagcaattgcccttggctttgccatccaccagctgcttgtgcctgaatatagcatgcctaatattgttcttggtagtgctcaagtgctgatcggctcgttgattggcatgcgctttgaccggaaaacacttaaggaacttagccgtatcggtgcagcaagtgcagcggcgttggcgctttatgttgtaatgagcgttgggctagcgctgatttttttcgtgcttacgccgctgccgttttttacaagtttgctagcgattgtgccagctggggctgcggaaatggcttcgacagcagctcagctagaactagacgcgaccgcagtagcaacactgcaaatgctgcgcgtgcttgccttattcatcgctttgccgtttctgatcaaattatttgctaagaaggaaaatcaacacgcttcttaacaaaggaaaacctccgaaaacatacgttctcggaggttttcagccttaacgatcatttccagcccattcgtctttacgcctcagtgaagctttgttttataggtcttccgtagcaggaaataatcctatctcctacaaaaacaatgttagatatcctgacatacttatagaacaattctgacatcagattataatgacgatataaaacaagggctggggggagacgaattggaaactgtacttatggataatttatggctaaccatttccgcaatattagttcttcttatgcaaggcggttttattttgcttgaggcaggctcaactcggatgaaaaatgccggtcatatcgcaggtaaaacgatttttacggtcggtatcgcttcacttgtcttttgggccgttggttatggctttatatatggggacggcaatccttttattggcatggctgatttcttttttggcaactatgcagatggtgttggttcggttgacttcttcttccaacttacgtttgctgcaattgcgttaacgattgcctttggtggttttgctgaacgggggaagcttgccgcatacgcgattttcgctgtattgttctctgcctttgtttacccgctcgtcgcacactggatttggtcagaccaaggctggctggctaatttaggaaagcaagattttgccggttccacagtcgttcacttgacgggtgcaatggccgctttagcagctacattgattttaaagccacgtcttggcaagtatgacaaaaatggcaaagtcaatgacttgtttggccataaccaagtgtataccgcccttggcgtgttgattttgtgggtcggttggtttgggtttaatgccggttcgactggcggcgtcgctgatgcgttctttggttatgtagcactaaatacacagcttgcggctggagccggtaccattgcagcactgtttcttgtttgggcacttaatggaaaggccgacgtgccgacgacattaaacggaacgcttgcaggcctcgttgccatcactgcttcttgtgcattcgttgcgccgtgggctgcagtccttattggcgtcattggcggattgattgtcgttgtcagcatgaacatgtttgataaacttaaaattgacgatcctatttttgccttaagcgttcacggtgttgctggtgtatgggggactctatcaaacggactgtttgccacgcctgaattagcagaaatgaatggcggcctgcctggattgttttatggcggtggtttcgaacagcttggcgtccaactattaagcgtcgttgtttgcggtgtgtttgcttttgtcgcttcttacgtattgttgttcataacaaaagggcttctcggcggaaacttgcgcgttacagaggaagaagaaattctagggcttgatatgagtgagcacggttcttacgggtatcctgaaactgtccagtctgaaaaaacgtctacgcaaacaggttcttaacatgagcaaaccatttgcctatgcaaaagaactgcaggcttaccatgaacaaaaattacatgctgctgtttcggctgcaggagaagaaataaaaaaggagctgggagaattccctgctccctttgccttttttgttatgggcagcgcggggcgcaaggagcaaatttatgacagtgaccaagaccacggcattgttttcaaaggagaagatgatcgccatttgtcctattttttaacctttggcgaaaggattgtgacacagcttgaagctgccggctatgaacgttgtgttggcggcgtgatggcctcatgtgaacggtggtgcggttcagccgaaaaatggtctcaacagctgcaacattggctcacaaaagatacgtttgaacatgtgcgctatgtactcacatttttcgatgcccggacaattctaggagaacatgcctttgttttagacttgaaaaaacaattgtttgcccaaatggaacgctctccccacttaatgaaacggtttgctgacaataccggaagaatgccgcaagtccgcaatttatttgggcagctccttgttgaacagcgcggtgaacaccaaggggccttaaatgtgaaagagcaaattctgtttccgtatgtcaacggcatgcgcttgctcgctcttcagcagcgcatgatggctacgtcaactttagaacgattcgcggctcttccgccgggaagcggttttgaggaagctgaacgctcttttgcctccttatttgaacagcgggcttactggattaagcagttttcttcttataaatacattatccctagccaattgacaaaagaagaacgcaatgacttgaaaacatgggcaaaagaagggcgccgcctttatgaaacaatccagaaaatcgttgaggcaggcggaagcaaatgatgaataacatgatgcaatttatgcggcaattatcaaatcgcttcgggttcgccatgtcggcagcagaaacggggaatgccgcccaaatggcgcgtttccgccgttttcaaaaggaagcccagctcgatgtcctccacattccttttgcacagctcccgatcgttgtatttgatttagaaacaagcggattccatccagaccaaggcgatggcattctatcgataggggccgtgaaagtaactggaaatgaagttcacaacgatcatttttatgagacgattaaaccaaaacagcctccatgtgaggaggtgctgcgcctgaccggtttgtctttgcaggagctagaccattctccgccaattaatgacgtgttgctacgattctatgactttgctggcgcagccacacttgttgcacaccatgccgcccatgagcgcaagtttatgcgccatgcgacatggcaagagctaggccgcacgtttacacatcggctcatcgatacaacgtttttaacaaatataaccgccgcccaccagcagtttcaaacacttgatgaatggtgcgatgcttatgggatagcgattagccaacgccaccatgctttagcggatgcacgtatgacggccaagctttgggcgaaacatattacactggcagaacacgcgggctattattgcctcggggatatttataaagagcttgctctaagaaaataaagggagcaagctctttttggagaataaaagaagaagaatgagaatcgttgctgtttctagcgaattagagaggtgacctagcataacctggagaaatgaaaacgaactcgtttttcgccgtgaaaacacgattttctttaaggcaatgcaccatgctatgatgaataagttgatttcatcatgagcgaacgtggcggtctttccttttacaagccccacgttgccgcattcgtttttccatgatgagaaaggaggcgtttatgcatatacacgcagaagatgtgctgttgcaaatggaacggcagatggggagaatcgcgaaagccgttaaagacaatgacggggatgaattaaaagaagcggctgctgtgttggagagctattgccagttgttaaaagggcatcctcttgagtctaggttacagcaagagaaaacaaagccgatttcgtatccattgcctgttcaaaagcgagttccggaaacgaaggaacttggttctcctttggccgaaacggaaggtgaacaagaggaaaagcgaaatttacttgatttttgataaagtcgccctcttaaaagaggctgccttttagtagaaaggatgtagatgctcattcgttatgaaattattgtttccgttataatttatttgctgattatgctagtgattggctactatggctataaaaaaacagtaagccattccgattatacgctcggtggcagaggtctttcgccaacagttgcggcgttgagcgcaggcgcttctgatatgagtggttggttaatgttggctttgcctggttcgatgtatttgacaggcattggcgccggctggctggcatttggcttaattttaggcgcttatttaaactgggtttttcttgctccaaggttgcgcacttatacagaaacggcgaatgattcgattaccattccagcctttctagaaaaccgatttaatgacacatccaaactattgcgcatgctgtcaagtttgatcatcattggcttttttacgctctatgtttcgtcaggcatggtatccggtggtgtcgtatttgagtcggtgcttggaatagagtaccggacagggcttatgattgtggcaggagtgacgattgcgtacacgctgtttggcggttttttagcagtgagctggacagacgttgtccaaggcggcgtcatgatgttggcgttattgcttgtgccagctttcgcactggctgaggttggcggggtttcaagcacctttgtgcaaatccgcgacatcgatccgcttttaatggatatcttccgtggcgtgtcggttattggcattatagggtctcttgcttgggggcttggttatttcgggcagccccatatcattgtccggtttatggcgctaaggacggcgaaagaggcaaaaccggcgcggcgcattggcatgacttggatggtattgtctattgttggcgccatgtttactggccttgtcggcagagcttatttaacaggggaaggggttttcttagagacagcagaagcctcggaaacggtctttgttgttatgggcgatatgttgtttcacccatatgtgatcggctttatttttagcgccattcttgctgccgtaatgagtacgatttcctcgcaattgctcgtcacatccagttcactgaccgaagatatttataagacgtttttaaaacgaaaaccgagcgatcgtgaaatggtcatgcttggacgcggcgcggttttagtcgtttcattggtcgctttagctttatcttggcaacaaaacagtaccattctagagcttgtcagttatgcctgggctggatttggcgctgcttttggacctgtgatgttgattgctctttactggaaagggatgacgaaatggggagcgctggcaggtatgggtgctggggcgcttgtcgttgtcatttgggccaatacgaacctttatgcatttcttggcatggatgaacgagtttatgagttgttgcctggctttattgtcgctgcccttgtgatttatgttgtcagcaagctgacaaccaatccaaaacaagtccaagaagggtttgatgtgtttaagcagcggctcgatgaaaccaagtaataggaccgaggcaaacgacgaattatgcgattgtttgtctaccgtctgagccccgccgatgtttaggcggggcttaaacgtttaacggccaggagggcgccactccacaaaaacgccatagttcaacgattctgcgtcttctacataaccgttaagcacatgggtaggagtgagcccttgctttatcataaacgaaaggacttggtcgctgcgcttgccgttttttacttcggaaacgtattgttccggtccaatttctgttgaaacggcatgatagccaggaatgcggcagacagcggcaaaccgtgttaaaccgagttggagaaccgtctgcttgcgcgcttcatagagtgctgcggcaacccctttgccacggtaacgaggacggacacataagtcaatgccatacagtgtgtctccgtcaggttggtgggaagcgcggatgaggccgttgtcgcttatttcttcccatgtatgagagcggtcggcgttacggacaagaagggaagtggccgaaccagcgacttcgccattgacttcagcaagcaaagcgcctgctgggaaaacagttgcgtgtgcttcgacttgttctacggtccaccataactctgaaggaaacggcggcggaaacgcttctttttggatttgcagcaacgcttcataatcggctgcgctatagcgcctaatcgcaatcaccaatcgttcatcctttcttcacgtttcattcaattataccattttctgcattgcgcatggcgtgttgctagtaaggaactatgctatagtgaaagcataaacgaaacaagtggaggtgatgatagcgtggcaaaactttttttgctgttgggcgcactggcgatggcacttggtgtagcgattggcgcattcggcgcccatggacttgacggaaaaataagtgagcggatgatgagcaactatcagactggtgttcactaccacatggtgcacgggcttggcttaattgcagccggcttatttgctcttaaactaggcagctctgggcttgtgaatggagcaggctgggcgtttttagccgggatcgtcctattttcaggcagcctctatgtcatggcattaacgggaatcacaaagctaggggcgattacgccaattggcggcgttgcatttatcgtcggctgggtattgctagggttggcagcaatgcggcatttataactaagaacggctgagcaacgctcagccgttcattctttaacgaggcggggattgagacaagcctggttcatatccatactggtatgtataggcgattggctcatcaaatgtaacgaagtcgaggttgaccattaacagcaagtaatgctcgcctgtctcggggtttccaagtacaatgtggtcgcgccctgcctcttcaatcctgccgcgaaagactcgcgcattccattcgctattgccctcaaatgtttgatggacggttacaaatttgccccggtttaaacgcaaaatgttttcaatgaacgattgttctaacggcaacatgcctccttgcccagcaggcggagtttgttgttgctgcacaaaaccaggcacttggtacccttgtgctgaaaattgcggttgttgcaccatttgttgttgcccttgcccttggcctccatattggccgtatccttgttgctggcgattggcttcattctcatcgtatgaatacatgtttgccaccctttctatccttaaaatgtgctaaacacttcggcgcactctgcttcgagcggctggtaaaaacagtggtttttgaaacgcccggcattccattgcccccaccattgcgccggacaggcgccttcaggccggaaaaaccagagcgaaaagctggctgggtgggttctttccccgtttacgagccgccgcgccaagcgccgttcccgttctcgtgccctttgataaaaatagcttttctgaaccgcctcaaatccaccaggggattggaacgccatttgcggaattgttcttacatttgagaaatcaagacagtcgacgcggacacggttgaccatcacatttcctgccatcagcatgccttcttcgccttcaccttctgcctctgctcttattagacgggccagcatatcaatatcattggttgatgcttgaataacagccaatttgacacctccacttatgaatgcacgcaagttggtgaacggatcgatctgccaacaataagaaaagcttaaaaaacggggtttatgcttaaatcgagtcgtttttaaagatatgatcgggcaaataagaatatgccctagataagagacttcagcttatatccatttgaaaaactagaagcggaataacgtgatttactttttttacttgcacagaaagaaaaggtgtgtaatactgtgtatgtagatataaacagatgaacattgaaaaggactgttgcatatggcgaatgccttcaaactgctgctagtcgagttccggaaaatgggaattggccgttggatcgggattgtggcaacggctttgctatggggcgtcttgtatagcatgcttgttgttgacattgggccgcggattgaaaatgggattattgccccaggcttaggcgtcgtattgttcgtggtgtggtttttcttccccgttttttttgtgcgcggggaagcttatcggatacgggatccatacggcaaagtggccgtgcctgatatttacgtgcttttgaaaatgatgccgctcaaaaatagtgaaaaggcgctaaaccggatgttaagcatgtcggcttttattttagtggctaacgcctttctcaatgtatcgatttttgccagtgcttttttaatcggacattcgcccttttggggcgtaaaggcggcattagctttgttgctcctaacgtgggtgagcgggcttatatgggtggcatgtgagccttacgcgcggacataccgccatcgggattggttagaattttttgcttggatggcccctgtcgttattgttttatcattggttggatggctcagtgatttatggttcttcggcattgttatttattttttacaccatacgccgcaggtgacgttggcagtgctgtttgtgttgcttgttatccagtttttcgtaacgttcaaagtggtctcatccgcttttgaaaaggtggattactatgtctgatcggttgccgattcaactagatgagtcaagccgcacccccatttacgatcaaatcgaagcacagctgaaatcgttgattgtgagcggccaacttcctgctgggacggcattgccgtcaattcggaagctagccgcttcactgtcttgcagcgtgattacgacgaggcggtcttatcaaaaccttgagcagcaaggctacattaaaacgatccaagggaaaggaacgtttgtgagcgaaatgagcatgcaagaccagtcggaacaaaaacaagaagcggtgcaaaaagcgttagagcaagctgccgcagtagggcgcagctatggttatagcaaggaagagctgtccaattggtttgctgccgttttagaagggggggaagaaagatgatcatatgtacggagatcgaaaagcgggtggacgctcgtttttcaacgggtccgatttcctttcaggttgaacgaggaaccgttacggctctcgtagggaaaaatggctcaggaaaaagcacgattttacggatgatatctggcatggtacatcccgatgcagggacaatcgaacggtttcgccaacaagtgggagagagggagtggaaaaatcagctcgcctttattccacaaacaagcaaatcgtttgaaaagtacacgctttctcatttagccgccatataccggattggctttcaaacttggaacgaacagcggtttttgcagcttgtggagcagtaccgtctgccgctcaataaacaaataagccaattttccgggggtatgcagagagtcgcacttgccgttttagcactttccagaaactctaaagtgctcattatggatgagccttttgcaggcgtcgatattgaatcacaagaatggcttcgtaacgaatggcttcagtacttggaagaagacccagaaagggcgattgtcttttcgagtcacgtgcctgatgaaatcaaagatttagccgattttattatttgcgtacaagacggcaaacagacaggctactatgaaaaagacacgttgctgagcagttgggctcgcttttgggcggttgccgatttaaatgttgtgcgaaacatggccggggtgcactccgtaatacagagaggaccacaaatcgaaatcatttcaagtgacaatgggcaaacagaagcagcgatgcttggcgccggtttcgaaattactatgaagcagccgcttaaaatggcagagatcttacggttgcttatccaagaaagggagatggaagatgacgcttgaaattaagcaagtgcgcaaacggttcaaccaacatgttgccgtcgacgggatttccgttagcgttgaaaaaggcaatatgttcggaatgcttggcgcgaatggggctggaaaaacaacgacatttcgaatgattttaggattgctcgagccgacggaagggtcgattacttgggaaaacaagcaactttcttataaaaatacccatttgattggctacttgcctgaagaacgggggctgtacccaaaacttactgtccgcgatcaacttacgtacttagggaaattaaaaggaatgaaagtgcaagaaatccacaaagagatcaagcattggcttgaacggttccaagtggaagaatatgaaacaaagaaagtggaagaactgtcgaaagggaatcaacaaaaaatccaatttattgcagcagtgctccataagccagagctgttaattttagatgaaccgtttagcggccttgatccagtaaactccgacatgctgaaaaacgcggtccgttatttacaggaacttggcacgacaattgtgttttcaagccatcaaatgcgcaatgtcgaggaaatgtgtgaagacattatcatgctaaagcgtgggaaagcggtactgcaaggtagcctgactgatattaaacggggctacggcataaaaagtgtctcaattcacgctgattatgatttgtcgtttttagcttctgatcctcatgtgactaatttgacgccaattaaaaacggcgtcatcgctcgggtcgaaaatgaagaagcggcaaaagctgtgttcgcccgcgtagccgaaaaaggctttgtccgcaaatttgaagtagaagaaccgagcttgcatgatattttcattgaccaagtgggaggcggggcgaatgaataatttttggacgatagtcggccatactgcgggaagcaggctaaaggcaaaatcgtttatcatttctacagtggtcatcatggcgattgtcattattgccacaaacatttcatcaatcatctctgccttttcaggcgatgaggaaaatgaagtccagcaagtcgccattatcgatgaaaccgaaaacgcaggggacgtggcaacgatacttgcaacatctcctgaggaatcgttgtattcatttgcagtcgtagaagatgcatcattgaaagcaactctcgaaagcgcccgagacggcgactatgattatgtccttcatttaagcggatcgcaaagtgaattagacgccacactctatggcgggggcgatgattacgaagcggtagctgcgattgagcaggaagtgcagcgcgtcaaagaagccgtattaacaagtgcgcttaatttaagcgagtctgaccttgccgctatttttgaaccaatctcctttgcacaggaacctttggaagaaggggctgcgatagagacggaagaatcgcaaatgcaagcgtcctttactgtcttaggcgtgacctatgtgttgttttttatcattgtttcttttggtgtgatgatagccacagaggtagccgtcgaaaagtcctctcgtgtgatggaactgattgtttctagcgtcaatccggtcgtgcaaatgtttggcaagctagtcggcattggccttgtcggcgtcgtcaatatggttgcgattgtcgctgctttagcaattggcatgttgattggcgggaatgagattggcgatcttttaagcggcgatttgattgacatgagcttgctcggttacgcgtttttcttaacgattcttggctatttcttgtttggcggcattgcggctacattgggcgccctcgtcagccgaacggaagacgtcaattcatcgatacagccactgacctttatcgccatggctggattctttatcgtttcatttggcttaagcactccagatgcgccatttattacggttgcctcctacattccattttttacaccacagcttttgacgatgcgtattggcatgggcgtcattgctggctgggaaattgcgctcttatttgcgcttttaatagcaagtgtggtcgccgtcaatattttggctgcccgtgtgtataaaggcggggttttgatgtatggcaaagtgtcgatgaaagaaggcataaagcaagcgttggctttgtcgaaaaaggaaaagtaagcgcggcaaaggtttgtcctgaagatacgagtatggtaagatggaaatattgtgaatcgaggcagaaaggaggcggatgatgtgattgaccttataatggagttgccgatgttatgggtcagcgtagcccctgtcatggttgtggttgcgatggttgcctatgaaaatttcaagctccgtcgcatgcacatgcggatgaagcgtacagtccatgacacggataagacaggctgtgtggacatgactccagtccgccccttggcgctgtgggcgcggccaaaaattccttatttccgcgacaaaggctgccaagacgatgatggtccttacccttgttgcatgcaccaacagatagctgcatagacaacaaagggaggaaaagaaagaaatgaataaaaagaaagttatgcttacgcttagcgtagtaatggttgctttcgttttagcagcctgtaacacgaatgaaccgatcacagctgaatcaactggtttttggaactcatttttcgtctacccgatgtcatttttgattacctttttttctgatttgacagggggacattttggttggggcatcattattgtgacgattttgatccgtttgctgattttgccccttgcattaaaatcgcaaaagagcacacgggcgatgcaggtgctccgtcctgaaatgcaagaaattcaggagaaaatgaaaaaagcacaaggcaatccagaaaaacaacgggaagtacaagccgagatgttgagtctttatcaaaaacatggtgtgaatcctgctgctggctgtttgcctgcacttgtgcaaattccaatcgtaatggcactttattttgcgattatgcggaccgaagaaattggtgttggcccggctagcgcgttcctatggtttaacttaggcagccctgactatattttgcctgtcattgccggcattacgacgtttgtccagtttaaaatgtctatgagccaaatgccagcgaacccattgggcgaaggcatgccgaatccaatgaacatcatgctttacattatgccagttatgatcgtgattgctggaattacattgccatctgcgcttgctctttattgggtagttggtaacttgtttatgattgttcaaacgtactttattattgtccgccctaatatgacaaaagaagaagtgcaaaaagacaaagcgtaagcaaacagctatgtagggaaagcgtttgtctacagtctaaaaacagccttgacgtgagtcaaggctgttttttaaatatggaaataagcgggaatccgctctttttcaagaatgttgcctacgtaaaaagagccaaactcgccgtaacgggcagaaacttcatcgaaacgcatttcgtaaacaagcttcttaaattgcaggacgtcgtctgaaaagagggtgacgccccattcccaatcgtcaaatccgacagaaccggaaatgatttgtttcacaacgcctgcgtagccgcgtccgatcatgccgtgactgcgcatgaggtttttacgctcttccatcggcaacatataccaattgtcgttgccttcgcggcgcttgtccatcgggtagaaacagacatgcttccaccgcggcaattctggatataagcgtgagcgcacatatgggttttcatacggatcttcatctgaatcaccagctaaataattgctcaattctacaacggaaacgtatgaatacgttggaatcatataagcggcaagccctgatttgttaaaggcattctcaatctcatttaattcttccattgtcgggcgcagcagcatcatcatgatgtctgctttttgaccgacaatcgaatagagggcatggctgccttttccggctttttccgtcccttcccatttcgacacaagtgcttcaaattcattgagcatttgttcccgttctgaggcagaaacggttttccaggaattccagtcaattttgcgaaaatcatgcaagacgtaccagccgtccaatgtttttgcagcttcattcattgtagatggacctccagtatatttatattacctccactataacatagatggacgttttttcacctgctggagcgaatcaagcaaatcatcaccgggcaaatgtggctgcaagatgaaagctaaaaaaagaagcacataaggaacgatccgctggccaataagccagcggatcgttaccttttcgtgtcttccatgtttagggcttttccgtttgccggtacttttaagaaacgctcaagcgccaagcggtgttcacgagaggctcctgcttcccgctgggccgtgacttccatttccagtagttccgctaagtggtggtcaaaactttcgcggaaattttgtttcatgagccggtaagcggtagaaggcaattgtttacagcgtttaatataaggcgtggcttcgccaatgctatggataaggcccattgcttttgcttcatcggcgtcgaacattcctttaattgctagttccaagctttgcgggtagccaatcaaacgcggcaaaaagtaggatgcaccggcatcaggcacaagccctatctctaaaaagcctagcgcaaatcgtgcttctttgcgggcgacgcgaaaatcacaagcaagggcaatgcttaaaccagcgcctacggcagtgccatttatatcggcgataagcggcttgccaatgtgcaccatgaaagcaatgaggcggttataggtttcccgcagcgcctttccataattaaaatgctcttgttccgctaaatcaattgactttaaatcagcacctgaacaaaaagcatcgccactgcctgttaggacaatcacggtcacgtcttcccgttcatttgcttccgaaagcaggttgtacaactgttcgtggcaagcgtcatttaatgcatttttgacttctggcctgttaatcgtaattgtggcgactctgtcctcgacttggagtgttataagtggttgatccattgacattgcatcctcctttatccttttagtattcgactgataggcttgaaaaccctttccttatatggaagcgtaatctaaatgaggatttttaaaattgacgcttcagcaaaggaggtttcctttttaaataaagaggggtatcctaaatatagaaggaaatgatgactttttaaggaggttaaatcgtgggcgatttatttgctgacattaaacggcaagtagagtctcataagccaagtatcgtcttgcctgaaggaacagacgaacgggtattgcaagcagcggccaaacttgctgccgataacgttgtaaaaccgattgtcataggggataacgatgcgattttagcgcttgctgataaattaaagattacactagaaggaataacgatttacaatccagagacataccctggaatcgatgaaatggttgacgccttcgttgcccggcgcaaaggcaaagaaacggaggagtctgcacgcaagctgttacaagatgtgaactattttgggacaatgcttgtctacatggaaaaagccgacggccttgttagcggtgctgcccattctacgggagatacggtccgcccagctttacagattattaaaacacaacctgggattaagcgcacgtctggcgtttttgtcatggtcaaagaagacaaaaaatttgtctttggtgattgcgcgatcaacatatcgccaaatgaagaagaactggcggaaattgctactgctacagcggataccgcgaagctatttggtattgaaccaaaagtcgcgatgcttagtttttcaacgcttggttctgcttcatcgcaagaaacgaaaaaagtgtctgccgctactaaaattgcgcaagaaagccgtcctgaccttatcattgacggtgaatttcaatttgacgctgcttttgttcctgcagttgcccaaaagaaagcgcctgattcccctttaaaaggagaagctaacgtatttatttttccaagccttgaatcaggaaaccttggctataaaattgcgcaacgccttggcgggtatgatgcgattggcccaattttgcaagggttaaacaagcctgttaacgatctgtcccgtggttgtaatgttgatgatgtatacaaactaagcttaataacaggaatgcaagctattacacaaaaaacaggacaaggagtttaaacgctgcttggcccttttgatgcaaaaaaagctttggagtaaaacaatccaaggccttttttctccttttttagcgtaaacaacgattgtggcggtcaatgacccgttcaagctgtgtttcatacagcagctcttcttcaggtgaaagaaccgctgactctaattgcccgccgctttcaagaatagctgttttcgcccgtccaataatggtttcgatcgaataaggtacgtttgtcagttcagataaagacgccatcacttcaggtttaatgtcaggataggaaaacgctggtttactcgtttgcacagctttattgtaaacagagcggatcaatgcagctctagcgctgccgcttccttgtacacaaaggtatatttgtacagcaataccgcctcgaatccttcgctgggaaatgcctgcaaatttcttgccatcgatgctcaaatcgtaacttcccggacagtaagatccagcaatttctcctgcttcaatttgttcctctttaaaaatcgctttaacaagcgttaccattcgttcgtagccttcatcaatggaaaaggttgcttcccctggaaacacaagcgatagatttaatatgcctgcatctaaacaaacggctaatccgccggagttgcgaacaacggcacgatagccttcttgctcaataaattcaattgcttcgcggataaagggaaggcgtgtgtcttgtgtaccgagcacaatcgtgttttcgtgaacccaaaaacgaataaacgattgccccgtttttcctgcaagcgtgcatagtgtatcgtcaaaagcaaatgaacgaagcgcgctttctttcaaatatgttttgctattgtccactactttccaatcggtcgggggtagtggtttgtctacagttgccatttttgaaatccctccaacgtctactagccattataccagatttcatatccactaagaaaaggaagttgcgaaatatgtcggaagaaggtatactgaaaaaagtttttgctccagtatgaagcggttttcaagggccatcattatggctatgttctgaaaaatcataacccaaaagcggatgatttatttttttctttctcagggagaaaggcgatattaccggtcaaaaccgacaatttttaataaaatcgttattttttgttcatgctggggtacgtaaagattatagttgatgtgtttgggggtatttcatgaataatttgacaaaaaagatcttaattgccctgggcatcggggtgattgttgggttggtattgcctacgatccatcaaggcacctttgaatggctaaaccagtatgtgtttgatcctgtaggaagcgtctttttaaatatgattatgatggtcgttgtgccccttgtgtttttctcgcttgttgtcggggtttccgatttaggcgacccgaagcaacttggccgtatgggtgtcaagacgattattttctttatggtcacttctgttatttccttaacgattgcacttgctgcagcttcggttatccagccaggtgatcctggattgcttggggaagacatagctgaagagtacgagccatctgaagcagtgccgattatggacacactcgttaacatcattccgagcaatccagtggcttccatgtcagaaatggagatgctgcaaattatcgcgtttgcgatttttgtcgggattgcaatggctgtgctaggagataaagtgagcacagtaaaatcgttttttaagcaagcaaacgacattatgatgcagatcgttacgtttgtaatgaaatttgctccttatggagcttttgcgttaattgcctccgctctcggcgaggccggatgggctgctgttggatcattggcttcttatatgctgactgttgccggtgtgctgtttttccatttatttgttgtgtacgggttgattgtttatttcctaggaaaaatgagtccgttgaagttctttaaaggttttatgcccgcaatgactatggcgttcagtttatccagttcaaatggcgttctgccgctgtcaatgaaatccgcgcaagaaaatttaggcgtctctaaacaagtgtctggctttgtgcagccgcttggcgccaccatcaacatggatggtacggggatcatgcaggctgttgcaaccgtttttattgcccaagtgtatgttgtcgacttgtcgctgactgacatgcttattatcgtcttgacagcgacactagcaagcattggcacagcaggggttcctggtgttggcatgattatgcttgcgatggtgcttacttccgtcggtttgcctactgacggcatagcgcttattattggcgtcgaccgtattcttgatatgctgcgcacttccgtcaatattaccggtgatgctgtacttgcagtcattgtcgaccgcggagaaaagaaacgcggtgctatagatgagaatgtgacagaagtctcctaaagatgcgatcacaataattagtctgaaagagccagctaaaactcgctggctctttgtttttaagaaaacgccatttataataaggacaggataatcaatagaaagggggagaaagaatgtttacgacccttcatgaagaaaaagtcttcaaagatccggtccatcgctatattcatgtacgggatgggttgatttgggagttgattggcacaaaagagtttcagcgattgcggcgaattaggcaactggggacgacgtcattcacttttcacggcgcggagcattcacgtttcaaccactcgcttggagtgtatgagattacgcggcgcatgacggagattttttctggcaaggctgattggaatgaagatgataggcttcttgcgttggcggttgcccttctgcatgatattggccatgggcctttttcccattcgtttgagaaagtgtttcacacagaccatgaggagtggactaggcgaatcattttaggcgatacagaagtcaatcggattttacggaaaatggatcgttgttttcctcaagctgttgccgatgtaattgaaaaaacgtcaaccaataaattagtgtctagtatgatctcaagccaaattgatgctgatcggatggattatttgttgcgagacgcctattacacaggagtcagctacggccagtttgacttggagcgaatcttgcgtgtcatgcgaccaaaaaatgatgaagtcgtgattaaagcaagtggtatgcatgctgttgaagattatattatgagccgataccaaatgtattggcaagtgtatttccacccagtgacgcgaagctcagaagtcattctcagcaaaattttgatgcgcgtgaaagatttgcaagaacgtggctatgacttcaagcaaaaaccgctccattttttatccttgtttgcaggtgaaattacgttagaggattatttgcgtcttgatgaatcgattgtccattattattttcaaagttggcaggaagaagatgaccccatcttgaaagatttgtgcaatcgttttttaaatcggcgcttattccagtatatcgaatttcatccgaacgagcggatgaaagactggccgaaacttgaggctttgtttgcgaaagctggggttgatccaagttattatcttgtcatggactcgtcttctgatttgccttacgatgtatatcgtccaggggaggaagagcggttgcccattcatttattaatgccagacggttccctaaaagagttatcgacacactcggatgttgtcgaagcgatatctgggaagaaacgaaccgatcataaactttattacccagcagacgtattaacggatacacgtgtcgatcaggaaatccgggacagcattcaatcattacttacgactacataaaggaggaagactgccgtgctgcgtgaccatttaaatattctgacgctgtttgcgatgtcaggtgaaattgttggcagaaagaaattgcaaaagatggtctacatcgcaaaacaaatgggctatccatttaatgagcgttaccactttcaccggtatggcccttattcggacgagctgacagtgcgattagaagagttatgcaaccttggttttttaatcgagagcgaagaagacaaaggccattattcacaatatcgctatacgctttcgccacaagggcaagcgtttttggaaatgtaccatccccctgttgtcggctacaaggacttgtgccaatcgttgaacagccaatcagctcgtttcttagagctattgtctaccatcctttattttagcgatttagaagaaggggcaaggcgtgagaaaatacgtcagctcaaaaaaaagcaaaattatagcgatgatgattttgatgaagcccatacatacttgcaaaaactggcccaagttgtagccagtgcttaaatagaatcgctcatagattttacatgttgtttgacaaggattttgtagatatggcgccggcttagcgctacactagaaaagtgaaaggaattcaaggaaagaagggtggaaccactcgtgctcagctttattctcatgctccttttatttgcggctgggattccgttgcttctcattttgatactccattatccgttgatcggcgcttgtgtaatcgcctttatttctataaattggttcattgccgcacgcctccaccgtaaacacgagcggatgcagcatgcaggccatgacaaaaacggactgtaatccgatgatacagcccgtcggccatgcgtcttgattgcatggcttttttcgtgttgatttttaacaaagcgatggccttctctcaaaagtatatgagactgcgcttgtcttcaattggagacaagcgcctcaattgtaggaaaaggcgcccattcttattatttgtgttgatcgcttggccgttttccagcaactccgtagtcgtttggtttcatttcgctaatgatgatggaaacacgttcttttggtgcgcctgttgtttcactaacggcatctgttactttttcaactaatgcgcgtttttgttcatctgtacggccttcaagcagttgaacggtgacaattggcataaaaaagcccctttcttttcgagaatacattcagtataccaaaagaaaggggctgttttgatcatttaggaaaaagagcgagtgtttcataaacgtcttcatcgattaaatcagcgacaagcacataacgatccggggcagcgccaataaaatcgaatggataacaagtgatcaccgtcagctgtgcttcttccgtcggaacaatgacggtgcggtcatcttcatcgacgatccgtaccgtatgcaccttatacgtgtagacgccacttcgtgtttcgacaatgagttcatccccttcgccaacttctcctagtttgcggaacacggtatcacggtgtccagataaaacggagttgtccttttctccaggaagaacactgtcggcaaagtggccgacgcctttatccagttcatcttcatttgtcccgtgaataatcggaagggtcgcatcgatttttgggatcgttaatgtccccatttcttcgcctatttctggctgccagctggcaacgtcctggagatcgttctcgtaggccggtatcgcttctggtgcctcctcaactggggcagcgaccgtttccgtttcgctgtgcgccccaattttatagagaaagtaaccgtacgccagcttaaagcctgtcgttgttgtcaaccaaagtccgaaagcaataaaggcggcggcgacgaaaagcagagctgtttttttgaaacggccctgctttccatttgatttacgaagagccacttttaagcgaccttcttctcacgaaggaggcggcggaagataaggacaccagcaagggacattccgatgccgatcagcatataaaggggatagtttgtcgctgtttttggcattttggcaccatttgctgtttttgtcactttgccgttctcatcacgttccgcttttttgccgccgtcgttatgattggcgtcgtttccagcttttgccggaagaggagcctcatctttgccaggaagcgccgactccaatgatggtttttttggcttatcttttaggcctttatcaatttgagtgacgtcatcaacgatttttttgacaaaatgagaattgaacatctccgcggtaatataaaaatcggctaagaatgatccatccgcatcgtatagctcgaccaataagtcgtaccctttaatcgcattgccgctcattagctctttatagctaattggctttggatcttcgccaacgcggtcaaggtaatactttggatgaaggtcaaggacagatattgctttttcgccaatagcgaacagttcagcaacatcggcagccgacagttcgcgaattgattcaaagccgtcaaaggcgtacgcacgttgtttcaagtcatcgagttcggcggataagttcggattggtttcctgaatataccaaaaatgctcataaagcgcccactcttcttcatcacttaaagaaaactctgacaaaaatcctgagaaatcagggtaatatggttcgttgccccattcatcttctaatgtgataatgacatggacaaccatgtaaaacgtgttgtaaaacaataagtcgcttggaggcaggccgagccattcttcaagaagctcgtccaactcttggcgagtaaggtcaaattcagcagcgatttcatttacgccgtcatctgttaggcgtgggccgagaaattcagcgagctcactaacgtcggtaaaatcataaaaagtcgtgccatcccaccaatacatcaagtgttcggctaaatctttttcgctgacgccaacatcttctaaataagctgtaaactcctcattgtcaaatccatgggcaaggctggccgctggagcggaaaaaagaaagagtagagtgaaaattgctgtaaataacgacttcttcattttgttcctcccatattcaattgtcatttttatccgtgcatatgaattatataaacatgatcgcttaatgtcacgacttattttcatattttataaaaattttataatagaggctgcttttgccaaaaaacgacgaaattcgcttgtctgtgttgaagagggcaacggcgaggaggccgccactttttctccaaaggcagagaggatgaatgggcgtggcgttttatgatacactagtgtttagctaaaatgaaatttgggagggccgataaaacgtggatttgctcaataatgataacttaaagaaagcgaagaaaaagtcttccagttttacgatattaagcaatgattcaacagacggacacggtggttatggcgctggggtcatcaatctcgacaatgtgacgccgctatttattgatattgaagagaaagaagcgtttgtggatatgggtgccctccatgcccgctcggcagttgagaagcgtgtgaaatttatcgctgacgaagaggcggtgccaaaagaagggctaaaacggtactggcttgtgtgggtcacaatcgacaccaaggataaaaaaccatactatagtggagttgcagcctgttacatgacagtcaacaagcaggcgaaacggggatacaagagcatgccggaacatgtgaaccatatggataaatcgttaaaaggcaaattggttgtcagccaaatggatgattcgtcacgccaagtgctaaaggcgtttttgaaaaaccataatgaagaaatgtggaaccattcttcgcaggaacttcatgccgcacttgaatcaagcgaaaatgtgaacaactaatgaacaagttgccaaaaatcttgtactcttttttcgcttcggctacgctagagacatggatgaacatcctgacgataagtactaggacaaaaaagcagcggaagggctctccttccgctgctttttttatagctgttttagttcctcaacgagtgcagagaagcgcgccatcgcggcttgcactggctcaggcgtcgttaagtcgacacctgctttttttagcagttcgagtggctcgtcggaactgccgctttgcaaaaaggtcatataagcgtcgagtgcgccttcttcaccgtctaaaatggctgtggcgattttgattgctgaagcaaagccagtcgcatactggtaaacgtaaaaagccctgtaaaaatgggggatgcgcgaccagccgtatttgacttcgtcatcaaacacaatgtctgggccattgtaggtacggaacaactgttcataaagctcatttaagctctctgcattaagcggttcacctgcttcggctcgttcgtgcgtttgcttttcaaaatcagcaaacatgacttgtgtaaaaaaggttccgcggaattgctcaataaaatggttcagtaaataggcgcgcattctcttgtcgcttgtttctttcagcaaatagttaattagcaacacttcattcaccgtggaagcgacttcagcgacaaaaattcgataattggccgtaatttgtggttggtatttgctggaatagtagctgtgcatggcatggcccatttcatgaacgagtgtaaacaagctgtttaagtcatcatggtggttgagcaatacgaaaggatggacaccgtagacgcccatattgtaagcaccagaccgttttcctggtgtttcacgcacatcaatgtaacgcttttccttaaactcttttaatttggcgatgtaatcgtcaccaagaggctttagcgctttcagcatcgtttcatacgcttcttcatacgaaatttccgctttcacaccaggaacaattggcgcattcaaatcatattgccgcaattcatcgaggccgagcttttgtttgcggaggcgcgcatattcatggagcggttcaatattcgctttagccgcatcaatcaattggtcatagacgctttgctcaatgttgtcggcaaataaagctttatggagagccgattcgtattgacgaactttcgccaatgtgacatttgttttgatttctgctgacagcgtcgttgcaatcgtattgtttaattccacgtacggcttgtagtaagctttgtatgcttctttccgcttgtttcggtcttcgtcttcgatgagctttgaatacatgccccttgtcagttgcacttgctggccattgtcgtctgtcaccacgccaaactgaatatcggcattgttcagcatattgtatgtgtcgccaggggcttgaaaggttgcgcctaattgcgacaaaagctcttctttttcctttgtcagcacatgttttttaaagcgaaatgacttccacaattcatcctcgaaataggcaagtttcttttccgcagaaatgtaagcacggagcgtctcttcgcttaaacttaaaagaaacggcatgaagaaggaggtggattcactcacttttacgcttagttgtgtcgctttggcacttaatttttgggcatgggcgtcccgtgtgtcaatatcggataaaaacatcgtgtaggcgaaaacttttcgcaacgtgaaggagagcttctcttgtgtttctaggaaatcgagcaagctttttgcgtcttgaatcgcgccatcaaattgacttaacgtgtccgctagctgatagcacttgtctacatcggcctgccacgcttgttcgtccgcataaaggtcggttaagtcccatttttcatgttcaggtacatctttacgggatttgtatgtactcaagaaaatcactccttgcatgttttttcgttctagtgtagcacttatcgctgaaaatatgttcgtttctgcttttttgtatgaatttttgctggcggtggcaaaaatcgattcataaaagttataaaaataacggtcacgttctatgttatactgaggaaaaaggcggtgacatgatcatgctctcgtcagagcaaaaaaaagcgattcaaagccttcaggaaaaagtggaacaagctgacggcattaagcttaaattaaattgggacctcttagaaggtgagcgttccttaaacggcacggaagactatttttattataatgaaaaaggagagctgcttggttatttagcagtttatttctttggcaataaaatggaatgctgcggtatggtcgatcccgctgcaagaaggcgtggcataggtcgaatgcttcttgatcaagccgcctctgactggcaaggaaagacgaaacaatttctgttgaatagcccgactgattcagaaagcggcatcgcgtttatgaaggcagttggagcggagtacgcgtttacggaaaagcagctcgtatgccgagaggttccgattccttacacgaaaaaaggaattcgcatccggccggcagtatcaaacgatgaagagcggatttatgaacttgatgcagaagggttccatatgacaaaggacgaagcgaaggcgcttcatcataataaccctacatgggttacatatatgattgaagaagacaaccacccagttggcaagctcagcattagccgccaagatcaggaaagttggatatatgcttttgttttaacaaaagagaagcgaggacaaggcataggccgggcagctctgactgatattgtccaccgtgaagtctcgaatggcaaaacggtatggctggatgtcgtttgcacgaacgaagcggctctaacgttgtatcatacatgcggttttactgaggtcggttcccaaacatactatacattaaaatagattggcgcaaatggtcgtagctgcgagcgtttgtcgatgccctcactcagactgatagaagctgagagctgcacaaacgtgcagcttcttttcgcttattcagtggcgggactctcttcaccctcatcaagaatggttggcccagagggatcactcgggtcaccgtcttcaatgctaaaccatttaaagaaacgtttgaaaaagcctggatctttcgtttctggctcttcttgtaagtcttcggctgcctctggctcagcgcaagtatttacaggagcagttcctgctaaaaagtaagtcgtgcggccattaggacaggcgtcgctcgttaacaacccagtgtgggggtcaatgtcaacggcttcaacccctggcggttctttaaacggaagctttagttcattggccatcgctgcttccataaagtccgcccaaatccgtttcgagatttgcccttcaaccgattgattgatgtctttgtctttatcaaaaccaacccacacagcagtaacaagctgtggtgtatagccaaccatccagctgtcccgaggtgttgatccagattttccggctgtcgggtgcgttagctgtgcggctacgcttgcaccggtaaccgatgtgtagctgtttagcgccggttcaaatacgccgcgcaacatgtcggtcagcacaaaggctgtatcttcacggaggacttggcggacaggcggtttttgttcgtagactttgtttccctcgccgtcacgcacttggcgtatgaataccggttcccgttgttttcctccgtcggctaaagccgcgtaagcattggcgatatcgaggacggtgacaggttgtgcccctaaagcaagggaagggcggttttcaaatgtaccgagtcccagtttttcagagacatttactagttcgtctgtcccaatagacaaatgcgttttcatcgcataaatattgtctgagtaagcgatggcttcaagcattgtaataaaatcattggcgtaaatgtcgttgtagttactcggagcgtagtcttctcggccatcatcataggaaaaggatgtcgcttcacttaaaaacgtcgatacgggcgtaaaaccgttctcgagtgcagcgtaatacaaaaatggtttaatggtcgacccagggttgcgcatggcctgtgtagcgcggttataggaactttcattgtaatctgtgccgccgacaagcgcctttacttcaccattgcgtgggtccatggcgatcagggcgacttgcagcccgttgtcgggcatatgcttttcggccaaatcttcggcctgttgctgcaaggcgggatcaagcgtcgtctcaatgatcagtccacctgtgtcaacggccgcttcgtccatttgcgcttcattgtgtagcagcgctttaacatggtcttgaaaataaggcgcgatttcttcttcctctttatcagcttcgtccgcaaaaaccagtttttccgcttttgctttgtctgcttctgcctcctcaatcatgccttcctcaaccatgctatccaaaatcagctcttgcctgcttttcgctttttcgagatcattcaatggcgaatagtagcttggtcctttcggaatgcctgcaagcattgccgcttctgccaatgacacgtcttttgccgatttcccaaagaaatgctgtgcagctgcttcaactccataggcgccatgcccataatagacggtgtttaagtaaccagctaaaatctcgtcttttgaaaaattcatctccagacggagtgcgtaaagcagctcattccatttccgcatataggttttttcgtggctcaaataaaggttacgtgcgtattgttgcgtaatggtgctcgccccttgtgcttttgagccagattgcaaattggcaaggagcgctccgccgattcgtttaaggtcaaagccgtaatgggagtaaaactttcggtcttcaatcgcgattgttgcttgcaacaaataaggtgacatttctgttagcgggagagaaaagcggttttgaccggcttcttctttccccataaccgttccgtctgccgccaaaaactgtgttgtttgcacggcgtcaattggtggggggccttgcatgcgcgtataagataataatagaataatgcctaacgcgatgacgataagagaaagcaacaaaagccgccaaataagcctgattttgcgaaagcgtttccgctttttgcgcgtaactgtctgcatgacttttcatcctttccccggcaactggtttagtatacagtttgggaaaaaagcggtttttttaaaccttgttgtctttgcaattcgtaacgcatccgctatacttgctttgggcgtaaggaaaaatcatatgcctagcgagatatgagaggtgacaagcatggagttttggtttacagaaaaacaaacagaacgatttggcattacgatgaagataaaacggacgcttcacacggagaagacagacttccaacagcttgatatggtggaaacggaagagtttggcaacatgttgcttcttgacggcatggtaatgacgacagaaaaggacgaatttgtataccatgaaatggtgacacatgtccctttattcacgcacccgaacccgaagcatgtccttgtagtaggtggcggcgatggcggggcgatccgagaaattcttaagcatccttctgttgaaaaagcgacgttggtcgatattgatgggaaggtcattgaatactcgaaaacctatttgccgacaattgcctgtgctttagaagatgaacgtgttgacgtgaaagtcgctgacgggtttatgcatatcgcccaatcagcaaatgagtatgacgtgattatggtcgattcgacggagcctgtcggaccagctgctaaactgtttgagcgtgggttttatgaagggatttccaaagcgttaaaagaagatggcatttttgttgcgcaaacggataacccatggttccatcaggaactagtgtctaatgtgtacaaagacgtaaaagagatctttccgattacccgtttgtacaccgccaatattcctacctacccaagcggcatgtggacgtttacgatcggttctaaaaaacacgatcctcttgctgtagaagcaacgcgctttcatgatgtccaaacgaaatattatacgccagacatccaccgtgccgcgtttgtgctgccgaaattcgtccaggacttacttaaataggaggcttttacatgcgatttgacgaggcatactcaggcaaagtgtttattatgagccgcgccagttatgaagaggcagatgccgtcatttacggcatgccgatggactggaccgtttcctttcgtccaggttcccgttttggcccggcgcggatccgtgaagcttccttagggcttgaagaatacagcccctatgccgacaagcatttggaagaaattaactattttgatgcaggcgacattcctttgccatttggcaatgcagcgcgaagcctagacattgtggaggaatacgttgattcccttttagcagatggcaagttccctctaggcctgggcggcgaacatttgctgtcatggccgatttttaaagcgatgtatcggaaatatcccgacttagcgatcatccatattgatgcccatgctgacttgcgcgaacaatatgaaggcgaggcgctatcccattctacgccgattcgcaaagcgtgtgagctaattggagccgagaacgtttattcatttggcatccgctcaggcatgcgtgaggaatttgcttacgcaaaggaagcaggtatgcatctctataaatttgacgtggcagagccgttaaaaaacgtgttgccccatctatcagggcggcccgtttacattacgattgacattgatgtattggatccggcacacgcgcctggcacaggcacagccgaagctggggggattacgtcaaaagagctgctcgaagcgcaaatgctgctctcccaagcagacattcaaattgtaggcgctgatctcgtggaagtagcaccagcttatgatccgactgagcaaacagccattgctgccagcaagtttgtgcgtgagatgcttctcggttgggtgcataaaagataaagaaacaagagatgcagattgcaccccgtccctaaacccagtaaaataggaaaaagaacgcgcttcgcggatttgtgtgcggctagcagatcatatagaatggatgttttgatgaatgaagcgaaaagtgaaaatctcttttcaaactacaacatttatacaagggcaacagccggatgcgttctcgtttgatacggaaggcgacctttatataaaagggagtgcctcgtatttgcgctttaaagaaacacatgcccataaacaggatgtattttcaacgatgaaatgggacggccgcgagctcatgctaatccggcaagggacgatcattatgcggcaaagttttcttgcaaaagaagaaacgtatggacggtatgtcacgcctgaagcttcatgggaaacaaaagcgcggacagatacattgcttgtgcagctgccgacaggagctaaacaaaagggcagaatttatgtgcgctaccaattcttcttgcaaggccagctaacgggagagcatgaaatccgattggcagtcgaacgaatcgaataggtcagaacaggataatacaaggaatgtgccaatcatccttgtatttttttgctctgaaaggcagaagcccttgaagctcgttgcctgattcggctaaactacggatagacaagtcggtttcagccattttctaatccatagcgacaaacgtggatggggagcacttgatggaatgaataccaattagagacaaataaggagcctatgaagaatgaaccatatggaacgcaaaaaagaacagttgcgcgtggaagtgcgccgtgccgttttacaggcggaacttgctacagaatcagaagtgccgtctgtccttttggaagcgccaaaggacaaagcgcatggcgactttgccacgaatatcgccatgcagcttgcgcgaatcgctaaaaaggcgcctcgggctattgcggaagagctagtggccaactttgaccgtaaacaggcaggcattgaaaaaatcgaaatcgctggccctggctttattaacttttttttggataatggctatttgcgtgagttgatcccgcaagtcctcactgaaaaggatgactacggcagcagtgacgtggggcaaggcgagaaagtgttaattgaatttgtgtcagccaatccgacaggagacttgcatttaggccacgcccgtggggctgcagtcggcgacacaatcgccaatattatggataaagccggctacaaagtgtcacgggagtattacattaatgacgcaggcaaccaaatcgaaaacttggcagcttctttaaatgcccgctatttacaagcgctcggagaagaccaaccaatgccggaagacggttaccacggccaagacattattgatattgccaagcagcttgtcgacgaagcgggcgatcaatatcgccaactcgatgaaaaagagcggttagcattcatgcgcgactatggcttgaaaaaagagcttgaaaaaattaaacaagatttaaacgcataccgcgttgaattcgacaaatggttttctgagacgtctctttatgaaacggggcaagtcgagcgggggttgcaagtccttaaagataaaaatgaaacatacgaaaaggatggggcgacatggctacgctcaactgcttatggcgatgacaaagaccgggtgcttgtgaaacaagacggcacgtatacgtacttaacgccagacatttcgtaccatcttgataaatttgaccgtgggcatgaccgtttaattgatgtgctaggtgccgaccatcacgggtacattccaagaatgcgggcggcgattcaagcgctcggttatgacccggctcggtttaacgtacaaattatccaaatggtaagcctgttccaaggcggcgaaaaagtcaaaatgagcaagcgcacgggcaaagcggtgacgttgcgtgaattgatggaagaggttggcgttgatgcaacgcggtatttctttgcgatgcgtagcccagatactcatcttgatttcgatatggacttagctgtgtcaaagtcaaatgaaaaccctgtttattacattcaatacgcacatgcacgggtatgcagcattcttcgccaaggagaagagctaggcatcccttatagtgcaaacacggatttgtcgccgatagcaagcgaaaaagaatatgagttgctaaaagcaattggcgagtttccaggtgctgtggcagaagctgccacaaagcaaattccacagcgcattgctaattatgcctatgatttggcgcaagcgctccacagtttttataatgtgacgcgcgtcattgatacagaaaacaaggacttgtctgcagcgcgtttggcattgatgaaagcgacgcaaatgactattaaaaatgcgctcgccctgctaggggtggaagcgccagagaagatgtagccatggatacattatggtggctggtgattgccgtttttttcattgccagttttgttggtttaatcgtaccgattattccctctgtcctcgtgttatggggcggttttctcgtctatgtgtttgctttagagggcggcttgagcgttgtgttttgggtaggcatggcagtgcttactgtgttcttgcttgtcgttgacttgcttgccaacatggcgttcgtcaagcggacaggcggttctaaatggggggaacgggcagcgttggtcggcgttattgttggtgcatttgttgttccgccgttcggtttgatcatcgtcccgtttgtgcttgttctcatagccgaactcttgcaaaagcagccgtttgaaaaggcagtacgaatcgcattcgcctcttttctcgcttttataagcggcacgcttgctaaagcggttgtccaaattgtaatgattgcctggtttttgattgaagtactctagcagctgggccaaaagaaagagtggcaaccaccttgtatggtggttgccactctttttcgattatggttggctcgttttatcctagggcgtacgttactgttcaaacgtgcggtcacagcaatggtgaaaggggggctgcggtaacttctttcacacggtcaaggagtgggcgcttctggagctgttcgattgtaacagtcatggaagcgtgcatatcagcatggagcacagcgagaactgtttcaataaatgtctggtcatgggttaagcatgacatttcatcgtttagatgaaaactgcgtttatcgatattcggcgtccccactaaacatgtagattgatcggctactaccgctttaacatgataaaatcctcgataatagtggtagacaagcacacctgcctgtagcgcttcaattacataaggagtggccccatgcttaacaaggggatgatctgctttttcagggaggattaaggaaacgaagacgcctctttgcgccacgtcaatgatggcatccattacggcccgtgtcgggataaaataagggctgccgatgattaagctgtttttagcgctacgaataagcttaagcagtgtttgttcaaactccgtcccttgtgtgcttataaactgcaatgtttggctacccgcttgtaagactgggaaaaacgatcttcgttcaatatgtttgccagtcgccgcttcaaagtcagccaaaaattgtgtttgaatggcacggctgccttcacccgttatacggacatgaaaatcgcgccaaaagccaaaaaagggattgcgccctaaatattcatcgccgacgttatagccgcctaagtagcttgtatgaccgtcgatgatagcaagcttgcggtggttgcggcggttcaaggaaaagaaaaaccacgggccgtgcacttttgctgctattgccacatcaacgccggcagcccgtaactgcttttttgtccctcgccggagcttgcagccaaattggtcaatgagcaaacgagtgtctatccccgcctccgccttagcgaccaatgtgtctaccatccgttttccgatataatcatcgcgaaaaatataaaactgaatgtgaatgtgtttatttgccttctggatgtcttcaagaagcctatcgataaagtcttcaccatttgtgatcaattcaatcttgcttgcaagagggcctgttgaagtggcttgcgattttttccgaagtgctctgaggcccagtttgtaatcgaaataaagccaaacgccaatcacaaccactaaggcgagaatcgtaatgaggatattcataaaagacctcctggcaacaagtattgtctatagcttttcctgaattagggtggtcatgcaaaagaaaaaaagttcatctgactgaatgctcattcataaggattgtgttatactacgcttaagaatgggcggtaaagtcgttttccgcacaatagcttaaatagaatatacaaaggaggggtctttatgggcggtattagtacgggattgcttgtagcaaattggatattgttcgtttttgtaaccggttacgccgtttatttgtttgcttcccttgttgtcacgcgtattcgttttatacagcttggccaaaaagcagagtttgataaaacgatgaaggaacggcttaaggccgtttggatcaatgcatttggacataagaagcttatgaaagacaaaaaaagcggcatcatccatttcatgttcttttatggttttttgctcgtgcaaatcggagcgattgatctgatttggaaagggttaaaccctggcagccatttgccttttggcgctctttacccgtatttcactctgtttcaggaaatcatcgttgcgatgattttagtagcggttgtttgggctttttacaggcgctacatggaaaagctcgtccgcttaaaacgaggttggaaggcagggctcgtccttatatttattggcggcttaatggtatcaaagacgctggcaaaagggtttgaaatcgtgtggcacggaaaaagcttgacagcgtttgagccccttgcttcagcagtagcgttcttggctagctggcttcctactggcgcggctgctagtttatttttcatatgttggtgggcccatctgttgtttttattaagcttccttgtttatgtgccacaatcgaagcacgcccatttaattgcaggaccggccaatgtctttttagggcgcacacacaaagtcgggcgccttgcgaaaatagattttgaacaggaggacgccgaagaatttggcgttggcaaaattgaagattttaaccaaaagcagttgcttgatttgtacgcttgtgtggaatgcgggcgctgcaccaatatgtgccctgcgacaggcactgggaagatgctgtcgccgatggacttgttgttgcgcatgcgtgaccatttaaccgaaaaaggggcggcgatcacatcaaggacgccgtggatgcctgcgtatgcttttgccaatactcgtgcaaatacgctggcaactgaaagcgctcaagaagccgcagcaggttacgatgtgcgtctaattggcgatgtcattactgaagaagagatttgggcgtgcacgacatgccggaattgtgaagaccaatgtccagtcatgaatgaacacgttgacaaaatcatcgacttgcgccgttatcttgtgctaacagaaggaaaaatggaccctgaagcacagcgagcgatgcaaaacattgaacgccaaggaaatccgtggggcattagtcgaaaagaacgggaaaactggcgtgatggccgtgaggatattgaagtgccgaccgtaaaggaattaagcaaaaaaggagagacgtttgagtatctgttctttgctggttcaatgggtgcctatgacaaccgcagccagaaaattgcccagtcttttgcaaaacttttaaatgtagccggtgtttcttttgcaatcattggcaataaggagaaaaattcaggcgatacaccgaggcgccttgggaacgagtttttgttccaagaacttgcaagcgctaacattgaactgtttaaaaaacatgacgtcaaaaaaatcgtaacgattgatcctcacgcatacaatacattcaagaatgaatacccagaattcggcttggatggtgtcgaaatttatcatcataccgaacttcttgccaaattgttgcaggaaaataaattgacgccgacgaaagaagtgaatgaaaccgttgtctttcacgattcgtgttatttaggacgttacaacgatatctacgatccgccacgggaaattctaaaacaaattcctggcgtacgtattgttgaaatggaacgcaaccgtgagtcaggcatgtgttgcggcgctggcggagggatgatgtggatggaagaagacaaaggacaacgggtaaatgtcgctcgtacagagcaagcccttgctgttgctccgtctgtcattggcagcgcctgcccatattgtttgacgatgcttagcgacggcacaaagtcccttgaaaaagaagaccaagtgcttacacttgatgtggcagaattattggagcgggctatttaaggataaaaacgaacaagaggagcgaaagcaaatcttgttcaaaaataaaaatgagcgagcgttcgctcgggagggtgagcaacatgaaaacagctattgttagtggagcgaggacgccaattggaaaaatgggaggcgtgctttcaccattaaaagccgctgaacttggtggcattgtgttagaagaggcattgaaacgggcgcaagtgaatgcagaaagagtcgatgaagtcattatggggcaagtgttgcaagcaggggctggccagcttccatcgaggcaagcagcacatgcggccggcattccatggcgtgcaaaaaccgaaacgatcaacaaagtatgtgcttcgggcatgagggcggtaacccttggcgacttgtctattcgcgcaggcgaagcgagcacagttctcgctggtggaatggagtcgatgtcgaatgctccttattatatgaagaaagcacgatttggggcacgaatgggcgatacgacgttgcttgatggaatgatttatgatgggctgacctgttcgtttaacgatgtgcatatgggcgtgtatgggaataggacggcaaacgaactaagcattagccgcgaggaacaggatcgctgggctgctaggagtcaagaacgtgctgttgcagcaattgaaagcggtatcattaatgaagagattgtttccgtttcggtaaaaggcagaaaaggggaaaccgttcttgttcgtcaagacgaggcgccgcgcaaaggaacgaccgttgatagccttgctcaacttaagcctgtttttgggaaagagggaacgattacggcaggcaatgccccaggcgtcaatgacggtgcctgtgcattgctattaatggaagctgcacaagcagagaaacaaggcaagccaattttggcaacgattgaagcccatcaccgccttgccgtcgaaccatgggactttccgaaaacaccaggccttgttataagcgaattattggagaaaacaaagttaactgttgcggatataaggcggttcgaaatcaatgaggcgtttgcagcagtggctttagcaagcaaccaaatagctggattagatgaagagaaagtcaatgtcaacggaggcgcggttgcttatgggcacccaattggcgcaagtggcgctcgaattttgctaacgcttgcttatgaattgaagcgcagcgggggcggttatgggatagctgcgatttgcagcggcggtggccaaggcgatgccgtattgctacatgtgaaaggggaatgagcatgaaaacgttgatggtcattggcgctgggcaaatgggagcgggtattgccgaagtgtttgctgccaaagggtttaacgtgctcctgcatgaccgggagcttgagctggctgaaaaagggaaagctgggatcaagcaaaggctcgaacgtttagtagcaaagggatataccgaagagcaagatgtacaacagacactgacgggaatcaaaccaatcgccgatattgctgcatgtgccgatgctgagttggtcattgaagcagcaacggaaaacatggaaacgaaaaaacagctatttaaacgtgcagacgctcatgcccgagaaggggcaattcttgccagcaatacttcttcattatcgatcactgaattggcaagcgttacgaaaagaccggagcatgttattggtatgcattttatgaatccagtgccgcgcatgaagctagtagaaattatccgcggcttgcaaacatcagacgccgtctatcaacaagtgctggagctgacagaggcattagagaaagtcgctgtcacgtcgcaagattatccagggtttattgcaaaccgaattttaatgccgatgattaacgaagcgatatacaccctttatgaaggcgttgcttctgcagaagacattgataccgtgatgaagcttggcatgaaccatccaatgggcccgcttacacttgctgattttattggccttgacacatgtttggcgattatggaagtactccaccaaggcttcggcgacagcaaataccggccttgtccattgttgcgtcaatatgtgcaagcgggctggctaggtagaaaaacgaaaagggggtttttcgtgtatgaatagccttctattctcggaagagcagcaaatgatgcagaagatggtacgtgaattctccaatgacgtcattgcccccgtcgtcgaagaaatggaagagtcacaattgtttccacgggatgtactcaagcaaatgggggagcttgggctaatgggtgttcctgtgcctgaggagtttggcggcacggggatggactttgtttcttatattatagctgtacatgaagtatctaaagttagtgcagcaattggcttaattatgagcgtccacacatccgtaggaacgatgccgatcgtagcgtatgggacagaaacacaaaaaaaggcatatgttccgaagcttgctacagcagaagcgattggtgctttttgtctgactgaaccaaatgcaggtagtgatgcgcgggcgctgcaaactcgtgcagtcaaaaaaggcgaaggatatgtgcttaatggttcgaaagtatttattacaaatggcggtgaagcagacacataccttgtctttgctgtcaccgatgctgacaagggggctaaaggcatttcttgttttatcgttgaggctggcaccccaggcttaattgtcggcaaaaaagaacggaagctcggcttggcaggttcgacaacgactgaaatcatttttgaagattgcaaagttccacaaacgcaaatgcttggcgaagaggggcaagggctaaaaattgccttgagcaacttaaatgcagggcgaatcggcattgccgcccaagcgcttggcatcgctgaggcggcacttgaggcggcttgcacgtatgccaatgaacgaaagcaatttggcaaaaagctccttaaccatcaaggcttggcgtttaaattggcggatatggctacagaaacagaggcggcaaagcaattaacctatgcagcggctcgacttaaagaggcaggaacgccatgcgcgaaagaagcgtcaatggcaaagctatttgcttcgcggacggctatggatgtagcgacaaaggcagttcaagtctttggtggctacgggtatatgaaggagtatccagtagaacgttattttcgagatgcaaaggcgtgtgaaatttacgaaggaacaagcgaaatccagaaaatggttatagctaggcaattcgaaaagtagcctagttctcaggaagggcagatggtatgataggaggaagacgagtatgcaccggggagtaggttgaatatgtcgaaaaaatttgtgccatcaatggtaaaagaccagcagttaattaaaaaaagacgcgaacaaattattaaaggcgctgtccgtctctttatcgcaaaagggtttcaccggacaacgacaagggaaattgccaaggaatcgggctttagcatcggcacgttgtatgaatacattggaacgaaggaagatgttctttaccttgtgtgtgatgccatttatgatgaagtgacagaacgtgtccgcacgcaacttcatacaactggaacggcgctagaacgtttaattacggcaatccgcgcttattttgccgtcgttgatgacatgcaagaagaagtgcttgtgatgtatcaagaaacaaagtcgttgccaaaagaaacattgccttacgtcctaaaaaaagagctagaaatggttgaaatcatgacggagctcatagctgaatgcgtaagtgaaggcgaacttgccatttccgaaaatgaaagccgccaactttcccataacattttagtaatggggcagatgtggacgttcaggcgctgggctgtgcaaaaaagccaaacgatcgaagcctatacaaatcagcaaattaagcaactgctcggcgcttatctcgttaagcggtagcgcacgacaacggatgcgagcgtttgcctacagtctgatgccgccatcatagacgtggcggctttttactcgttcattctattctgctcgatttgctctatttttctcctatccataagattggcgctagcattaacagggaaatatgtttataatgggacgtatgattttaactacgaatggcttacaataaaagtagcgtgattaaattgggtaaatgtggaaaggacgtgtagactttggtggatttgcaatccttgacaaaagaagagttgaacgaaatgtcaatggtagaagccgcttttattgtaatggcaaacaagcggcagccttttaacttttatgatctccttgaagaagtcgctaagctaaaaggaatatcagaaacagaaatggatgagcggatttcattcttatatacagatttaaacctggacgggcgctttttaacgcttggcgataacacgtggggtttgcgctcttggtatcctcatgaacaagcggaagaggaaattacacactctgctaaaccagccaaacgtcgcaaatcaggcgatgacgacggggaggaagagtacgaccttgtcgacgagcttgaagaggatgagtttgaagacttggaagatgaactggacgagttggctgatgaagaggaccaggatggcgaacgggatgactatgacgagaaagatgatgcgctgccaggatttgacgaggaagacggtcaaacgcttgatgaggaagattaatagtagaacttgacttcttgatctgttatcggtaaaatcatttttgggcttcacatgagcgtagataatgaacatgaatacaaacaaaaggggcgccccagccatgctgggtgaggtgccgcttttgttttttttatgatatagcaaaacggacagaagagcagacatcgtaagcatcccctgactaattcaaaggaggagtcaatatggcagcgaagtatatatttgtgacaggcggagtcgtatcatcacttggaaaagggattacggcagcatcacttggccggcttttgaaaaaccgcggcttaaaagtgaccatccagaaatttgacccatacattaacgtcgaccctgggacgatgagcccttaccagcacggggaagtgtttgttactgacgacggtgccgagacggacctcgatctaggccattatgagcgctttattgatattaatttaagccagaattcaaatattacaacaggacgcgtgtattcgactgttttgaaaaaagaacgccgtggcgattatcttggcggaacagttcaagttattccccatgttaccaatgaaattaaagagcgtgttttccgggcaggacgggaaacaggggcggacgttgtaattacggaaataggcgggaccgttggcgatattgaaagtctgcctttcttagaagcgattcgccaaattaaaagtgatgtcggtatggaaaatgtcttgtatttgcattgtacgttgattccttacttaaaagcagcgggggaaatgaagtcaaaaccgacgcagcactcggttaaagaattacgttcccttgggattcaaccgaatgtcattgtcgttcgtacagaacggaaagtgccgcaagatatgaaggacaaaattgccttattttgcgacatcaaaaaggaagctgtcatcgaagcatgggatgctgacaccctttatcaagtgccccttgatttgcaagcgcaaaaccttgaccaaattgtttgcgaccatttgcagctaaactgccctgaagcaaacatgacggagtggaaagaacttgttaaccgggtgagtcatctttctgaaaaagtacggattgcgattgtcggaaaatacgtcgagcttcaagatgcctacttgtcggttgccgaggcattgcgccatgcaggctattatgtcgatgccgatattgacattgattgggtgtatgcagagcaagtaaatgatgaaaatgtcgacgagctattaaacaaagcagacggtattcttgtgccagggggattcggtgatcgcggcattgaagggaaaattactgctattcgttatgccagggaaaataaagttccgtttctcggcatttgccttggcatgcagcttgcttctgtggagtttgcgcgtacggtccttggtttgaaaggggccaactctgctgaattaaatccgcaaacgccttacccaatcatcgatttgctgccagagcaaaaagacgttgaagacttgggcggcacacttcgtttagggctgtacccttgcaaactacaagaagggactgcagcccgtgcagcgtatggcgaagaagtcgtttacgaacgccaccgccaccgctatgagtttaacaatgaatatcgggaacaaatggagaaagcaggtttcgtcttttcagggacaagccctgacggacgtttagtggaagtgatcgaggtgacggaccatccgttctttgtggcgagccaattccatccggaatttgtttcccgcccaactcgtccgcaaccgctcttccgtgaatttgttcgtaacgcacttgcagcacaagcttagtcatctcgttgatcgttggtgagcgaggaaatggctgacatatacgagagtgtttgtctacaataggaggattggccatgcggccaatcctctttttttatggaatgcgcgagtcagcagtattcttcaagaatgtcatggataacaaactttagcccatggtagacgtaaaggcccgcaatgacccctggatgaccgatacgttttcccgtttcatcaggaacgagcccccctttaacacccgtatcaagaaacaaatgaggcggagcaaggcttgctgtgctggaagcgtggcgtgaagaaacgacaacagctgctattccagcttgttcgcaggctttgagagctgcttgcacacccttatggttgaggcttggggcaaacagcagacaccgatcttgtccagacagcgtgccttctttagggaaaggagcggccccgggcatcgattcatatcctgtaaaagcagccaattcgattgcttccatttccgcaaaaccctttatataaacgttcccttgtgcgataatggcttgtgcaagcaggcgcccggcgtcttcaaggtgctcctcttgcgtttcattgattgatttgattaagccgaaaagctgtgtggagaatattttcagcatgaaggcctcctaattttagagcatacgttgttcgtgcttttgttttcattttattgaccaaattcgcagattgcaaataaattagagggaaaagcgcgaaataacgcgaatcattaacaaaaaagaagaattctcagaaaccaatgaagggggcatagtatgagtcataaagtgcttatagttgatgatcaattcgggatacgtgtgttactgacagaagtattgcaaaaagatggatacgaaatgtttcaagctgcgagcgggaaagaagcgttggcgatccaagaggaagaggaaatcgacattgtcttgttagatatgaaaattccaggaatggacggtattgaaattttaaagaaactaaaagaaaagcaaccagggattaaagtcattatgatgacagcatatggtgaactaaatttagtaaacgaagcgatggatcatggcgcggtgagctacatggctaaaccatttgacattcaagaagtccgggcaacgattcgggacaatcttcaagcctaggaacgtttgtattggtatcgcttacttttaaaaaccatttctttcttaagtcaattttaaagaacttatgctataatggaggcgacctaaggattgcggcataggcgtgggcttgattttggcccgtttttattggccagaatacataacttcttccggaagaggttagcttagaaagagaatgctttatatgatttgaccacccctatgcagacgaatttaaggaggacaaccatgcctttagtatctatgaaagaaatgctgaacaaagcaaaagcagaaaagtatgcggtcgggcagtttaatgtgaacaacctagaatttacgcaagcgattttgcaggcggcagaagaggaaaaatcaccagtcattcttggtgtatctgaaggggctgctcgttacatgggcggttttaaaactgtcgttggattggcgaagaatttaatggaagaatacaacgtaaccgtgcctgttgctattcaccttgaccacggttcaagctttgaaaaatgcgtggaagcgattcatgctggctttacgtctgtcatgatcgatggttctcattacccattggaagaaaatatcgcccttacgcaaaaagtagtggacgttgcccacgcccttggcgtatcggttgaagcagaacttggccgaattggcggccaggaagatgacttggttgtcgacgatgcagaagctgcttatgccattccagaagagtgtaaagagcttgttgaagcaacaggcgtagattgcttcgcgcctgcacttggctctgtccacggcccttacaaaggcgaaccaaaccttggatttgaccatatgaagaaaattgacagcctcgttggcattcctcttgtccttcacggcggcacaggcattccaacaaaagacattcaaaaggcgattgagtttggccacgccaaaatcaacgtgaacacggaaaaccaaatcgcttctgccaacgcagtccgggaaacgcttgacgccaaaccggaactgtatgatccgcgtaaataccttggcccagctagggacgccattaaagcaacggtcattggcaagatgagagaatttggttcttcgaacaaagcgtaaacaattcgaataaaagcagtcgcagggactgcttttattctcatttttgattgtaaccgtttttttattatgacccggccaaatcatccactacttagcacataaaatgagtatgattgcttttaataaggaggctttaccaagatgaaattcttcgtagatacagcaaatataaatgaaattaaggaagcaaatgaacttggtattttagatggagtaacgaccaacccttcgcttgtcgcaaaggaaggcgttgatttccatgagcgcattgccgaaattgcaaagctcgttccaggaagcgttagcgcagaagtcatctccttggatgcggaaggcatgattgaagaagggaaaacgcttgccgccatttcagaaaatattacggttaaagtgccgatgacagtggacggcttaaaggcggtaaaagcatttgctgaactaggcattaaaacgaatgtaacgttgattttttcagtgccacaagctttgcttgcagcccgtgctggcgctacatacgtttcgccatttttagggcgtttagacgacattggccatgatgggttgcagttaatctctgatattgccgacatcttttcaactcacgggctgccaacgcaaattattgctgcatctgttcgccaccctgtccatgtgagcgaagctgcaaaacgtggtgcccatattgcgactattccattgaacgtcattaaacagttgacagggcatccccttacagataaagggattgaaaagtttcttgcggattggaacaaagagaatgtcgaaaaataaggaaactcgtacttttttagcggactctggctatactggataaagatatgcgcgtttgatccagtgaaaaaggaagggattgcaatgcaaaagcttttgattgaaggcggccatacattagaaggcacggtgtcgatcagcggtgctaaaaacagcgctgtagcccttatacctgcggcgatattggcagacagcgcggttgtcattgataacttaccggtcatttcagatgtagacttattggcagagcttcttcgcgaaattggcggggacgttgatttaggcaatcaaacaatgaccatacatccagaaaagatggtagcgatgccgcttcctaatggcagagtaaaaaagctgcgagcttcgtattacttaatgggtgcgatgctcggcaaattcaaaaaagccgttattggcttaccgggcggttgcaatttaggcccgaggccgattgaccagcacattaaaggatttgaggcgcttggcgcacaagtaacgaatgagcaaggcgcgatttatttgcgtgctaatgagcttcgaggcgcaaaaatttatttggacgtcgtcagcgtgggtgcgacgattaacatcatgcttgccgccgttcgggcgaagggccgaacgatcattgaaaacgcggcaaaggaaccggaaattattgatgtggcgacgctgcttacgagtatgggagcgaaaataaaaggggcagggaccaatgtgattcgaattgacggtgtcgatcatttgcaaggatgccgccactcgatcattcctgaccggattgaagcagggacgtacatgattatggcggcggccatgggccggcgtgtccacattgacaatgtgatcccgacgcatcttgagtcggttacggctaaattgcgggaaatgggaacgactgtcgaagagtatgatgaccagttgatcattagcggtatggatccaaaaaaaggtgttgatataaaaacacttgtatatccaggctttccgactgatttgcagcagccatttacaagcttgttaacgagcgcagaaggcacaagcattgtaacagataccatttacgacgcccgttttaagcatgtcgatgaactaagacgcatgggggcaagtgttaaagtggaagggcgttcttcgattgtgaatggcaagtcgtctttgcaaggggcgaaagtcaaggcaagcgacttgcgtgccggagcggcattagtcattgccggattaatggctgaaggcattaccgaagtatcaggacttgaacatattgaccgaggttatgaacatctcgaaacgaagttgacaagactaggcgcgaaagtatggcgggaagagctgacagaggaagagcttgagcaagtgaagcaatcataacgatttttgcttgaaatgtggagggagatagagtggaacgtagtttatcaatggagcttgtccgagtaactgaagcagcagcgctagcttctgggcgttggatgggccttggcaataaggaagaagcggaccgtgcggctacggaagcgatgcgcgatgtgtttgacacgatcccgatgaaagggacagtcgtaattggggaaggggaaatggacgaggcgccgatgctttatattggcgaaaagctcggcaatggctatggacctcgtgtggacgtggccgtcgatcctttagaagggacaaacattgtcgcatacgggcaatggaacgcactggctgttcttgcagttgctgaccacggccatttgcttcatgcgcctgacatgtatatggacaagcttgcagtaggaccagaggctgtggggaatgtcgatatcgatgctccagtcatcgataatttaaaggcggtagccaaagctaagaacaaagacgtagaagaccttgtcgtcgtcattttaaaccgcaagcgccacgaaaagctcattcatgaagtgcgcgaagcaggggcccgcattaaattgttgcctgacggagatgtggcagctgctgttaataccggttttgacgatacgggcgtcgatttgctaatgggttctggcggcgcccctgaaggtgtccttgcagcggcagggttgaaatgccttggcggtgattttcaaggaaggctcttgccccaatcggatgtagaacttgagcgctgcaaacaaatgggcattgaggatacaagcaagctgtttcgcatggaagacttggtgagcggcgatgattgcatatttgcggcaacgggtgtaacagacggtgaattgctgacaggtgtacgctacaaaggcacaaaagcgattacacagtcgttagtcatgcgagcaaaatcaggaactgtacgcttcgttgacggtactcatagcatgaaaaagaagccaaaactcgtcattcgctaacaatataaaagggaagggcgcgattcttcccttttttgattgattattttcagcaactatggttaaaataggatttagcaagcctttatcccttcttgtttaagatgtactctccatagaccttccttatgtttatccaatcgtagtggaatttaaaaacagcattataggcgggcgctttctgccttattttatttacaaaaaagtgtggtggccttatatgagcttaaatattgctgatttagagagcatgacattgaaagaattatatgaacacgcaaaagcgtttaaagtctcttattacagcaaactaacaaaacgagaattaatttttgctattttaaaagggcaagcagaacaagatgggcttttgtttatggaaggtgtccttgaaattatccaaagcgaaggttttggtttcttacgcccaatcaattatttgccaagcacagaagacatttatatttctgcttcgcaaatccgccggtttgacttgcgtaatggcgacaaagtttctggcaaggtcagacctccaaaggacaatgagcgctaccatggcttgctccatgttgaggcggtcaatggtgaagctccagagacatcccgtgaacgtccccatttccctgcgctgacacctctttatcctgaacaaaaaattgatcttgagtcaaagccgggacgaatttcttcacgcattattgatatggtttcgccagtcggatttggccaacgtggcctcattgtcgccccgccaaaagcaggcaaaacctctctaatgaaagaagtcgcaaatagcattgccgaaaagcatccccatgtggaactaattgtattgctaattgatgagcgccctgaagaagtaaccgatatggaacgctccattgatggtgaagtggtcagttcgacgtttgatgaagtcccagaaaaccatattaaagtagcggagcttgtcctagaacgggcaatgcgcttagtcgaacataaaaaagatgtggttattctcatggactcgattactcggttggcacgggcctacaaccttgtcatcccaccgagcggtcgcacactctcaggtggcatagaccctgccgcgtttcaccgtccgaagcgcttctttggcgcagcgcgcaatattgaggaaggcggcagcctgacgatactagcgactgcccttgttgaaacgggttcacggatggacgatgtcatttatgaagagtttaaagggacgggcaatatggaactgcatcttgaccgccgcctagctgaacgccggatcttcccggctattgacatccgccgttcaggaacgcggaaagaagagctgttaatgccgaaatcgcagttggacaaattatggacgatccgtaaaacaatgaatgagtctgctgattttacagaccagtttatccgccgcgttaaagaaacaaaaacaaatattgagttctttgaagcaatggaatcggaaatggcaggaaaaaagcggaattgacttggacaaactttaggttgcaaacggtctgttgacttgatataatttcgattatgtgagaactctgtttcgaagagattcagggcaaaaggagatgaaatcatgaaaccagaaatccatccaacttaccaaaaagttgtatttatggatacaagcacgggctttaaatttttgactggttcgactcgcggttctagcgaaacgatcgaatgggaagacggcaatacgtatccgttgattaaagtcgaaatttcttctgattcccacccattctatacaggcaaacaaaaacttgccgatgcaggtggccgtgtcgatcgcttcaaaaagaaatacaatctttaataagaaaaatgcgtgatcatcaggcaagagtctcttgcctgtttttttatggaggggcttatggcacagcttttttttaagtatggcgcaatgaacagcggaaagtcgattgagattttaaaagtggccaacaattacgaggaacaaaaaaagccagttttgatttttacatcaggaatggatacacgggatgaagtcggttatgtgtccagccgcgtcggccttcgccgccgggcagtgccaattttcgatgacacaaatatttttgattatgttgaaagctgccgacaaaagccgtactgtgtattaatcgatgaagtgcagtttttaacaaaagcgcatgtcctccaactggccaatattgttgatactttagacattccggtaatgggatttggcttaaaaaatgattttcgcaatgagttatttgaaggaagcaaatacatgcttctgtacgcagataaaattgaagaaatgaaaacgatttgctggttttgccataaaaaagcaatcatgaatttgcgtgtggacgagcaaggcaagccgatttatgacggggaacaaattcaaattggcggcaacgaaacgtattatcccgtttgtcgaaaatgccaccaacacccgcctttaactgtatgattatgccctagatgagcaagatgtaaatcaacctaaaaatgaatgtctttttgtaggcgtgggaccctaatgatgcacgcttctttttcgaagctgcacaaagggggagacggatgaagtcggcaacagcagggattgcaatcgctcttttgctcgctggatgttcaaacgccaatttcagctcacagcacatccagcatgacaaacattacggacaaggtgcttttggtccaggcccacttaattttgagcatatgaaacatgaaacgtatgatccgcgcctaacgaatattggcacaagctatcgagacgcaagtgtgcctcaccgtacgcttgccgacgatgctgcgcaagtggaaggcattgtcgagagtcaaggatttcgttctggcgccgcgattgtcaacggcggtgatgtttacgtaaaagcgtacccgtcaccatcctggagcaaagaacaaacgagcaagaggatggagaaactcaaacgtgcatttgaggcagaaatccctcgctatcaagtccatgtccgttaaagaggagcgcaaagccattggctttgcgcttcagactgtagacaaacgctcgcatacttcgtcgtttgcctcactcatatgcgttgaaacggtcgtttcacgcgcaagaaaaccgctgctcatgaacccccgtctattcacatcttccctcggctgcacatgattgttatggccggcgcctggctgtttgttgcaacgggtcccatacactgttaaaaggaggggaatagcctaaatcaagttcttcgagatcctgcatggtcatgccatggtacaatgcggtcgcaaggacatcgcagcgtttgtcgacgccttttgtcccgatgaactggccgcctaggacgacgcccgtttctgcatggaactgaaggcgtatatggatcgtttcgtttgttgggtaatagccagcaacatggggaagcttggcttgcacgcatttgtaaggatagccgatttcctcgatttcacgggaagacaaaccagtacgtgcgagcgctaagtcaaagaactggtaaatttgcgtcccgacaattcccatgaagacgcgtgtgttcccacacatgttcaggccagcgatccgcccttgcttattcgcatgcgtgccaagggggtaatacatgtctttgttaattagacggtgatactgcgttgcgcaatcgcctgctgcataaacgtcaggcacatttgtttccatatagcggttcacacgaatggcgccgttgttgttgaggtgaatatcggtatttcgcaaaaagtcggtatttgggcgaacgccgaccgcaacaatgacgatgtcggtgggacattcagtcaagttggtgcgtatgccagtaacgtggccgtctttgtcgccgctaaagccaatgatttcgtgatttaactcaagctcgatcccctcatcaatggctttctcatgaatataatccgccatttccttatcaaaattcatcgccagccgcttggcccgttccaaaatccttacatggtggttcgctttagcgagattttcagctacttccagcccaatcgaaccaccgccgatgacggttacggttttcttttccgtaccgagggcagcaattattttttttgcatctggaatggtttttaatgtataaatcccttttaaatcgccgttttcccagtctggaatgacagggctcgcccctgaggcgattaacagtttgtcgtaagcaaggcaaaagccatccccggaaaccgttttttgtttcgtatcaaccgcctttacctcatggttaatgcgggcgtcgatgccatgcttgatgcgataggtgtcggcatcccgggcgataagtttgcgatctgattcaatttcgccaccgatccagtagggcaagccacactgggcgtacgaataatgttcgcctctttccaatacagtaatatcggcttgtgcatctttgcgaacgagctgcatggctgcgctcattccagctgcatcgccgccgatgatgatatatttcacatgaatcccgccttttctgtgcttggttttaatgaaaacggccttttgaacaaagtacaaatagtattcccgcaaaccgaatgaacaaaccgcgttgtcccttagctagattgaccgttaatgaaggcgtatactataatggggaaggagtgccgcaatgaagaatgaggtgacgtcgtgttagaacgattgcaagcagtagaagatcgttatgagtacttaaacgagcaattaagcgatcccaatgtgattagcaatgcaacaaaattaagagaatactcaaaagaacaagcacaaatagaagaaaccgtacaaacgtatcgacaatataaacaagtcacagaacaattggcagatgcaaaagcgatgctcgaagaaaagctcgatgatgacatgtatcaaatggtaaaggaagagctggatgagttgagcgagcgaaaggccgaattggaagaacgcttgaaaattttattgttgccaaaagacccgaatgatgacaaaaacgtaatcgtcgaaattcgcggtgcggctggcggcgacgaggcacagctttttgcagctgacctttacaaaatgtaccaccgctatgctgaaatgcaaggctggaaaacagaagtcattgaagcccacgcgactgagcttggcggctacaaagaaattatctttatggtcaatggcagcggcgcatattcaaagcttaaatacgaaaatggcgcgcatcgcgtacaacgggtgccgcaaacggaatcaggcggccgcatccatacatcgacggcgacggtggccgtgcttccagaagcagaagaagtggaaattgacattcacgaaaaagacatccgcgtggatacatttgcatcgagcggcccaggtgggcaaagcgtcaatacgacaatgtcagccgtgcgcttaacccatttgccgacaaatacagttgtttcatgccaagatgaaaaatcgcaaattaaaaacaaagaaaaagcgatgaaagtcctccgcgcccgtatttttgataaagttcagcaagaagcgcaagcagaatacgctgagtcccgcaaacttgcggtcggtacaggcgatcgctcagagcgaatccgtacgtataattttccccaaagccgtgtaacggaccaccgcatcggtttaacgctgcagaaacttgagcaagttttgcaaggcaagcttgatgaaatcattgatgcccttgtagttgccgatcaatcagaagcaatgaaaaaggcagaggaataatggcgattacgattcacgaagctcttcgctgggcttcgtcttttttgcaggaaaacggagttgaacctacagcaggggaatggctattgcggcaccatgggaacatggaacgggccaaactattggcaagcttaagagacccccttttagaaccagtttggcaagcatttaaacaagatgtggccgtccttgcttcaggggttcctgtccagcacgtacttggctatgaacaattttatgggcggacgtttctcgttaatcgcgacgtccttattcctcgcccagaaacagaagagcttgttgcgctcgtgcttaataaattaaagcctggccctcaagccatccttgatgtcggtacgggcagtggggcgattgcgcttacgttaaagctagagcgacccgattgccatgtaaccgcgacagatatttccgagaaagcgctagacgttgcccgggaaaatgcccagcggttaggtgccgacataacgtttgccaaaggcgatttactagctccagtagcaggagcggtatttgatgtcattgtgtccaatcccccctatattccgtatcgtgatcgggacagccttgcggtccatgtgcgtgaattcgaaccggaaatggcattgtttgctgaagaagatgggctaatgttttatcggcggctggcggaagaagtgcccgcttgcatccatccgcgctcattggtcgcagtcgaaattggcgctggccaaggcgaagcggttcaagcgttgtttgctgccgcatttccctttgctgatataaacattgtctatgacataaacgggaaagaccggattgtgtttgtttctggcaatctgggacggcaaggccataatgttgattagcgctccttctgtttttgtcgaatgattttgtgtttaaaacggccttttcctgaccaacattggtaaggaaagggcggtgcaatcaatgaaaccaagagctattatgtatctattaatctctttatttgtaggtttaatgagttgggaagcacagaatgcacaggcggaaggcgcctatcatggacaagtttctgcggatgatgctatccgcttacggatattagccaatagcgactcgattgccgatcaagcaataaaacgggaaattcgtgacgaagtaaatgccgctattggagaatggatcggggaaatggcaacgatggacgaagctgctgctgaaattgcttcacgtgttcctgagcttgaagcgatcgtagcagagcagctagcagcaaaaggcgtcgaccaagactattccgttgcgtttgataaagaggttgcctttccaacgaagctgtacggaaacatggtataccctgctggactgtaccacgctgtcctgattacattaggggaaggtcaaggcgaaaattggtggtgtgtactgtttccgccattatgctttttagacatggacaatggcgaagcgaccaatacagcggcagaaggtagcaatagcgaccaatacagcggcaccgaggaagctgccgaagtggaaacatcgtttttctttgtagaatggtttgaatcgatctgggatcggttatttgcctaataggcatatttgtacaagccctctcataggatgaagtaaaaggagggggcggagatggcttttactgttcgaaaaatggaagaaacagacctgctggctgttcaggcattatttgcccggatgcaaaccaaacaacccgtaacgttagaagacccattgattgtcgtagaaaatgacgcaggcgaattgattgcaacagtgggcctggaaaaagccactatctacggtttgctccggaccatggtcatggacagcgcaaaaatgagttcaagtgcattggttgaatttatccaaatggcgctagcctatgcgcaaacagaaggagtagaaaccgtgtttgctgccagtcaaggcaacgccacattatttgaactgctcggctttaaacgtcaagaaaccgatgccataccaaatgaaataaaagaaatggagcactatcaaacggtagtggaacaggatggcgtttcgatttgggcttatgtttgttcgcctttttcttcctaactgtggatttgtggataaggattgtgaatagttgagtcaaataaaataaaaatagcgctctattaacttatgaacaggttatccacaggtgtgggtaacctgttttcggcagctgactttctgttttgataaatgagactataagggataaccattgacataaaaggattttttcgatttgattaatgtggatggaaaagagagaggaaggcgaacacgagtgaattataaacagacgaaacaatggattgtggataagaatatcgattctgacaaacaaaccgagatgattcaagaagctgctctgtggataaaacaaaataagctaattgccttcccaactgaaacggtctatgggcttggcgccaatgccctttcatacgaggcggtcgcgcaaatattcgcagcaaaagggcgccctagcgataatccactgattgtccatattggcgatagcagccagttggacaagctcgtaaaatcgattccgcttaacgccaacaaactgatggcggctttttggccaggagcgttaacattaattttagaggccaaagaagccattgctgaaaatgtaacagccggactatcaactgtcggtgttcgcatgccttcccatcccgttgctttaaagctgttgcaggaatgtgggctgcccgttgctgctccgagcgcaaatatgtctggccgtccttcaccgacgacggcagcacatgttattgccgatttagacggcaagatcgacggtatcgtcgatggcgggtcgacaggcatcggccttgaatcaactgtgcttgacgtatcgaaacctacgccgatgctttaccggccaggcggcgtgtctgttgaggaaattgaagcggtcatcggcaagatcgacattgatccagccttggagacggcggacagtgctccaaaatcgccggggatgaaatatacccattatgcaccaaatgcagaagtaatacttgttgacagtgacgacagcatccatcatttagtggcggaagcgaaaaaagaagggcgaaaagtcgctgtgttcgcaacgacgggaacggccgattataaagccgatattgttcgccggggcgagtcgcttgagcataccgcccatattttgtatggcgttcttcgcgactttgacgaacaaggagcagacatcatttatgtaaaaaccgttcctactgagggagtcggccgcgcgattatgaacaggctcgaaaaagcggcaggcggcaaaagggtgtagcatttagtttgtgaaaatgcctttgttggctaaatagactgtcggctgactaccgcttatggtatgatcaggaaaagggtgagtacggaggggaaagatggcaaggtttgaggcaaagatgaactactctacgtttgtagagaaagaaacagacgtaatatacgggacgatacaagtaaggcttgcacgtgaggaatgggacgttccttattatattgtatcggatgacgtatttgcccatgaacgaagagagtttgacgggcgaggcgaattacaagagattttagatatgatttcgtttttttataacgaaacagatgcagagctcgagagtgtggtgattttgaagccgtttcctgaagcgattgcagccaccgagtcattttcagattggcttgaagagtggcagcgctattttcacttaagcgggttgaaagatgtaggctatattcatgatgtggcccgtcctgatgctgacgcgatcgctcaaatcttagaagaccatggttttgaaaaagaacttatgtctgaggacgaaaacagagccttctatttttactcgacagcattgcctgtccctgttgacttcccgaatgacgaggaaggcatcgttttacaacagttaaaaaatgctggctgcgatttggagaaaccacgggaagtagaattcatattattaattgagaataaacgaatggcgaagaaagcagcgaggctagtgagccaacatgggtttgaaacaagcctccatgaagaagaacaaggctatgccctttcctgtacattagaaatggtgctaacatacaaagcggttaaagcgaaattaaaggaactcgaagacttgacaacggagttcggcgctgttttggatggctggagcgccatgacggatgaagtagaacaataatcaaagatgaaagtctgttgctataagcggcaggctttttttctgttcctttttagacaaccgctttcagcttgtctaaaatttcgcaggcgcgcatatgttcaaatagcatgttttttgcgaaagaggggataaacaatgcatgagtttgtgacgatatgtataatggcggcagctttagggatggatgccttttctgtggcgctcggtatgggcatgttgaagttgtcaggcaagcaaattttccgaatcggcttgacaattggtttgtttcatgtggccatgcccctcgccggaatggctgtaggaaaatggctttcaggccactttgatgtcattgcgacttatattggcgggggcttattattggtaattggcgtacaaatggcgctaaacgcattttctgaccatgaagctgaaggattgaagcccgctggttggggtttgcttctatttgctgtcggtgtcagccttgacagcttttctgccggactgtcattcggcattcttggcacagaaatgtttgtgaccgtcggaatgatcggggcgatgagcatggtgatgtcatggattggcttaatcgttggctctcattttcaaaagtttttaggtgcatatggcgagctgctaggcggcctagtgttgattggctttggcttaaagatcatgcttcccctctaatgccaagggaacggccgtcccgatgtttccatagcgtaatgatggagctcgtttaacccccaaaagcagatatggtagactaaaacaaacgactttgggaggaaaaacgacgaaatgaaaaaacgtgtattggttgtatgcactgggaatacatgccgctcgccgcttgcggaagcgtttttaagaaaagaagggaaaggcgccttcgaagtacgctctgctggtctttttgctcatgcaggaagcgggctttcgagcggctctcaatatgtacttgaaaaagaaggcttattgtacaagcatgaagcgaagcaagtcactgcagaattaatcgattgggctgatatcgtgttggtcatgtcacaaagccataaagcacagcttgaaagcatgtacgagcatgtagaggtgcaaacgctgaaagaagctgctggcgaaacaggtgacatttccgatccatttggtggctctacagaaacgtatgaaaaaaccgccgcggaaattaaagcggccgtattaaaatttattgaaaaaaacgaagcatagagggtgacgatgtggaagggaacggtgtcggcagaacatataaattcagcattcgcaaaaagttagtagtaggagtcagcgcagtagccgttgtaacatttgcctgcagcgcgtttattttatatttcctggctgattatctcgcgcaggcgatgtccattgaccctcggttggtgataccgttaactttatttgtcggtgtcatttggagcgccatttttggctatttgcttgctccctttattacaaaacctttaagcgaattggaacgggctgtcacacaagcagctgctggttctgtcaatacatctgtaaaactttccaaatcggatgacgagctacgggctctagggattgcttgcaatgacatgcttgccagcttaaagcaaatgacttcggacattgaggtgaattttgtcgaaaccgataagcgtgtcaaacagcttgctgatgctacggagcgatcttcgagccaaggtaatcaaattggtttaacgatggcagagatcgccagtggcgctgaagcctctgcaaaggcaattcaggaaacggcagccaccttagaagatacgacgcttatggcgacagaaatgaaagcaaaagcagactcctcaaaaggccaagccgaagagatggttgctactctcgaagaaagccgcaaacggacagattcgctcgtgaacggagtgggcgagctatcaaaaaagcaagaggcatctttggagtctgtccgccgtttggaacagcaagcggcggaagtagaaacaatcgctagtttcgttggctcgatcgccaaacagacgaatttgctcgctttaaatgcgtcaatagaggcgtcaagagctggcgaacatggcaaaggctttgccgtagttgctaacgaagtgcgaaacctggcagatgagtgcggccgtgctgtcgcttctataggggaattaattgctgccatccaagaagaaatgcagcaaacggtggccgatattgaagcgcaagcagcggttgcccgaaaacagagagaggaaagcgaacagaccactgcagcaattgccaagatggaagcgtctgtgaaaacggtagccgcattaatcggcgaagtgtcactattgtcagacaagcagcggcaatcgatcaaggaaagctcattaaaaacacaggaagtggcagcgattgcagaagaaacatctgccggagcagaggaagtcgccgcgatgacagaggaacaaagccaagctttagaggaagcggcaaagctatcctttgacttagcgaatcaagccaagcaattgaagacaacgattgaaaagtttacaatagaatcaacctagtaaaagcgtcgatataggacgctttttttaaaccaaaaggagtgtccaacaatgaaaattgcgattgcttcagaccacggtggaacaaggcttcgtgcagagattacagcgatgttagaggaaatggggctttcctataaagattttggctgtgattgtgaaggttctgtcgattacccggattatgcccttcctgtcgcagaaaaagtggcgcaaggagagtttgaccgcggcattttaatttgtgggacgggcatcggcatgtcaattgctgccaataaagtaaaaggcatacgttgtgcccttgttcatgatacgtttagcgcaaaagcgacaagacagcataacgatacaaatatgattgcattaggggagcgtgtcatcggccctggacttgctgttgaaattgttcaaacatggctcggggaagcgtttgaaggcggacgccaccagacgagaatcggcaaaattgctgcttatgaagagaaggcaggcttatgacggcgagaaaaacgagcttgattgatttgcttagtgagtttacaaaggaagcgcctcctttggcgggaaaactttttgttgttggcgcatcgacaagcgaagtgggaggtggccggatcggcaaacaaggttcagaaaaaattgcggctgaactatatgacgctttcgttcactttagcaaggaaacaggcgctcatctccttttccaatgctgtgaacatttaaaccgtgctttagtggttgagcgtgccattgcccatgcccaccggttcacagaagtagcggctgtacctgtacctcgggctggcggtgctatggctgcgtacgcctataagcatatgcaagaccctgttctagttgaacaagctgactgcgacgctgggattgacattggcgatacattcatcggcatgcatttaaagccggtcgctgtacctgtgcgcgtttcagcaaattcattaggcagcgcccacgtaacgtttgcctattctaggccgaaattaattggcggagaacgggcccgctattcccttaaagattagcgctatcaaggccgcggcgatcggttgtcaggaagcgtcgctgccagtacaaacaatgaaacgcaaattgcaacgtccttttttaatggaaagggataacggttgaaactgaataaaagaaaaaaatcgcttattatcttccggaaaaacctattcttttagcgatatatacgataaaatgaaaagcaattagactaaaaaacgaatgttgtgagaggggcagggtatgatggaacatttaaaaacgcaagatccagccgtatttgaagcgattcgccaagaacttggccggcaacgagacaaaattgaattgattgcttcagagaactttgtcagcgaagcggttatggaagcgcaaggctcggtcttgacgaataaatatgcagaaggctatcctggtcgccgttattatggtggctgcgagtatgttgatattgctgaagacgtcgcgcgcgacagagcgaaacaactttttggcgccgcatatgttaatgttcagccgcattctggcgcacaagcaaacatgggcgtttattttactattctcgaacatggagacacggtgcttggcatgaacttgtcccatggtggccatttaacgcacggcagcccagtcaattttagtggcattcaataccgttttgtggaatacggcgtccgtgaagacgacaagcgcattgattacgaagccgttagagaagcagccaagacgcaccagcctaaattaattgtagctggagcaagtgcttacccccgtgaaatcgactttaaaaaattccgggaaattgcggatgaagttggcgcttatcttatggtagacatggcccatattgctggccttgtcgctgcaggcctccatcaaaaccctgtgccatacgcccattttgtcacaacaacgactcataaaacgttacgtggcccacggggcggcatgattttgtgcaatgaggagacggcagaggaatttgggaaaaagctcgataagtcgatcttcccaggcattcaaggcggcccgcttatgcacgtgattgccgcaaaagcggttgcctttggagaagcattgtcagatgaatttaaaacgtatgccaagcaaatcattgccaatgcaaagcgccttggcgaaaagcttcaagcggaaggcgtggacatcgtttctggtggcacggataaccatttgctgttgcttgatttgcgttccttgcaattgaccggcaaagtcgctgaaaaagcgttagacgccgtcggcattacaaccaataaaaacgcaattccatttgatcctgagaaaccatttgtaacgagtggcattcgaattggcaccgccgctgttacatcgcgtggctttggggaaaacgaaatggatgaaattggcgaactcattgcactgacgctcaaaaacatcgacaatgaagaagcgctaaacagcgtccgttcacgtgttgccgcattgacaaaaacatttccgatgtacccaaatttgtaagttttagcagccttcttgtacaagaaggctgcagaccgtagacaaacgcccgcatacgtcgtcgtttgtctcggtcatatcctcatgaacccccgttctattcgcatcttccctcgcctgcactcctagtctgtcaagcgttttctatcagtctgtcatttttgtcggcaaatcgtgtgtttttgaactttcacttgaaggagaaaggggtcttcatgtaaaatcaatcagagtgtgtcgaaaaatggcgatataggaaaaggagtgtaagcgatgggaaaagtgcatgttttggatcacccgctgattcagcataagctatcttatattcgtgacaagcatacaggtacaaaagaattccgcgagctcgttgatgaagtggccgctttaatggcgtttgaagtgacccgtgatttgcctttggaagctgcagaaatcgaaacacctgtcggcccagctaaagtgaaaaagctggcagggaaaaaattaggtttggttccgattttgcgcgcagggatcggcatgtcagaagggattttgcgtatgattcctgctgctcgtgtcggccatgtcggcttgtatcgtgatcctgaaacgctaaagccccatgagtattatgtaaagctaccgaatgatgttgaagagcgggaattgcttgtcattgatccgatgttggcaacaggtggttctgtcgttgaagcaatcaatagtttgaaaaagcgcggtgcaaaaagcatgcgtctcatttgtcttgtagctgctcctgaaggcgtcgcttacgtacaaaaggaacatcctgatgtcgatatttacttagctgcgcttgatgaaaagctaaatgaaaaaggctacattgtgccaggacttggcgatgctggcgatcggctgtttggtacaaaataacgaacgagtagtcgcccacattcatgcatggcgggaatgtgggcgctgctttgtggaaaagtcgatttcatagcaaggaaagccttgcccctcttggtggacaggttcatagccgagcttttcataaaaagcggacgcgctgaaagaagcatgccattgcagccaagtagcctggcgtatgtgcgaccaacgaagaacgcctttaaataattgccgtcctgcgccttttgctctgtgttcaggaaggacatacaattcctggaggcggcatagcttcgtgccggtacgtaaatgtacgccaaaatcttgtgcccacacgtagccgattaattcgtcttgttcttcggcgacggcaatgtaatgatgtgaatcgttggagtatcgcttaaaccggtgctctaaacgatgttggtcgtctgggcttccttgttccttcattagtttgcatacagatggtccatcgtgttggaccgattcgcgaatgagcatattcatttgcgttccctccaagtttatttatccacataatcctctgaattacccacagcaattattagttatcaacagaacaacataattttatccacagttgtaaacattctatgcacaataaacgctttcctgcatagcgagctgcgtatagacacatactacacgttacgacacgcagtaggggagatcataatgaaacgagtgcaagcttgcatactgctggttatattaggtttttcaggacttattccgcatgtggcggctgccgaaacctatcctgttacgccaagggcgacggaaaccgtgtccgacgagcagcaaagcggcaggcgagtggtcattgtatcggcgaaagggaatgttgacaacgcagtagagcaagtaaaggatgcggttccttcagccaaaattaggcatgtttttaaagtggtttacggaggattttcgctagatttattagaagaagacattgatgtattaaaaaaattagacgggattgcccgtgttgatgatattgctatttaccagccaagccttgaaagcagcattccatttgtgggtgcaggaaaaagcgataagcgccacttagggccaggaggggaggcattgactggcaagggcgtcaaagtcggcgtcattgatacaggagtggattacgaacatcctgatttgcgcgccaatgtaaaaggtggttacgatgttatcgatgaagatgaagacccaatggaaacaaaagcggaccaaggagagccgactttccatggaactcacgttgctggcgttattgccgccaatggccgcataaaaggagttgctcctgaagcagaaatttatgcttaccgcgcccttgggccaggtgggcaagggacgactgaacaagtgttggaagcgattgaaaaagcggttgccgatggagtggacgttttgaatttgtcacttggaaatacggtaaatggaccagattggccaactagccttgctttggatcgcgcagttgacaaaggcgtagtcgctgtgacttcaagtggcaacagcgggccaaatatgtggactgtcggttcacctgggacttcggcgaaagcgatctctgtcggtgcctctctcccgccagtggaaattccgtatatgacattgacgaatgaaaaggagcgccggcttgaattaacgccactcgttggcgcaaagccatggaagcttaagcgtgacattcccgttgtcgaagcgggacatggacttgtttctgattataaggacgttgatgcaaaaggaaagctcgttttagtaaaaaggggtcgttctacttttgctgaaaaaatggagacagcacgaaaagcgggggcaactgggattttaatttacaataatttaaaaggaagttttgcagggggcgttatgcagtccgttgacttaatcggggcaagcctaagcaaagaagacggcgaatggctgcttgaacaactggaccattcaaaaaaagaactgtccgtgcgcactggctatgaacaaaagcaagacttgctggcgtcgtttagttcgagagggccggttactgaaacatgggaagtgaaacccgatctcgttgctccaggagtggcgattcagagtactgtaccaaaaggttatttaggcttaaatggaacgagtatggccagcccccatgtggcaggggcggcggctcttttgatccaacagcatccagactggaaccctgaacaagtaaaagcggctttaatgaacacaacgaagtgtttagtcgatgaacaaggaagggagtacatgccccacgaacaaggtgctggaaggttgcaagtagacaaggcgctcgaaacgaagacacttgtctacccgagttcgctaacattcggcacttgggaaaaaaaagcaccacgtacaaaaagggagctaacggtcacgattgaaaacatggaaagcaaagcgagagtgtaccatattgttccaccgcttggagagttggatggaattgagtgggaaacccctttttcggtaaccgttggtcccaatgaaaaaaagcaagtgacactcgctgctgacattgatccggcgcttttgcaagaagggctccatgccggcacggtcgaaattacaggcgggagcgacacgatccgccttccgtatgtgttgtttatggaagagccgaattacccgcgggtgatggcctttcaatttgtccatggagatgctaaaaatagttattactacgagtactatttgccaggaggggcagaagaatcagggattgccttatttgatcccgatacgtttgaatttgtagatgtcctagtctcccacgaacattctgagcgtggaatggtaagcggcgagctatctgatttaaatgtggctccaggccgatacagagcgttagtgtttgcgaaaagtgaaggcgtaaaagacacaatcgaggcgttcattgatgtcggggagccgccgcttttcccaaaagaaggctaatacatgaaaaaaaccgcattctcaggcggtttttttcgtgtatttggacatatgcagagcgttttgtcaatcggttatcgttcttccagcaggtgaattgcaacacaatcgccatttttaatgtagcggatagggcaaaaaatgcctctatgcatataggtagcgctttatttgggaaatctcaaacaatactatgacagttgtgtgaacaaatcgaggctctttcataactcttgtgatttccttgtaaaattcgttgacacgtgggggtggctattgtacgattataagggtcctcatgataagggttacatgtgcgttatgaatgggtttgcaatatgcgatggaggtcgtttcattgtctaaaccaaaccggaatccgatgcgtgcgtttgcgcttgtgtccatcatcacttcctacgttatcggtggtgttgttggcgggttatttcttggactttggctcgacaaattgtttgggttagaacccctttttttgattatttgcttgttagctggcctagggactggtacatatggcatttataaagcggttcagccatttttaggagacgatcaatagtgccggaaccgaaaagccttctaaaacagcaaatgtggcattattcgtgtatagttggatttatcagtctcattttcgtcataggttctatctttacaccactccaaacgattttcctcggccttttattaggcgtctctgtcagctatttgaatttgtggatcacttaccacaacgcaagcgtcataggaacgaacgtcgctccgtcgaaacgaccctttatggttttcgcgggattgggatttgtgtttcgactcatctttgcgttcatagcgatttggctggctcttcaatttccagaaaacatccatattgttgcggttgtggttgggctagggctgctatacggtgtgatgatggtcgacatgttcataaaagctctcatacgaaagaggtgaaatagtttgccggaacatcatcaatatcaatttgaattcatgggtttgctctttaatgggacaaccatgataacgacgacgattgcaatggccatcgtggtgattattacagtcattggctgccgcaaattggctatgcgtccgactgggcttcaaaattttatcgagtgggtagtggacttttgtcgtggaatcattaaggcgaacatggattggaaagtgggcggccgttttattgtcctcgcgtatgcgctgcttttctatgtgtttgttgctaatatgatggggattccatttgaattagtaacaaaagaaggccataacgttttttggaaatcgccgacgtctgatccggttctaacactgacaatggctgtatttattgtcgttttgacccatatttatggaatcatggtgacaggcccatccacttatgggaaaagttggtttacaccaaaatggtttttgtttccatttaaagtgattgaggaagggtcaaatgcgttaactcttggcatgcgactttttgggaatatttatgcgaaagaaattcttatgcttcttctcgtttcgttaggaacgacagcggtttattggggcatcttcgcttttgtgccgctcattgtgtggcaagcatttagtatttttattggttcattgcaagcgtacatttttgcgatgttggcaatggtgtacatgtcccacaaagtggaacaacattaatttcgtgattctcgctcaatttcagagcattagttactataaaaatttaaaccttaagggaggatttatctaatgacagaattagcgattgggattgcagcaggtcttgcagcaatcgggggagcaattggcgtagccattatcgttaaggcagtaattgaaggaactgcacgtcaaccagaacaacgcggtacgctacaaacgctcatgtttattggcgcgccacttgcagaggccgttccgattattgcgatcgttattgcgttcttactcttctttatggggtaacgcaaacattttatagtttgactagaggggcgacagtgttctacaaaacagaacctctcgcctttatttatgcaaggacgattacttctgcaaaaggggtgtaaacatggtcatcgaatggggcacagccctctaccaactattggcattcgctgtgttgcttttaattctttctaaatttgccctcaagccgcttcttggcgtcatgcaaaaacggcaagatatgattaatgagcaaattgattcagcggaacaaaaccgcaaggaagctgaaaaactgcttgcagaacagcgggaagaaatgcaaaaggcgcgagtcgaagcgcgtgaactgattgaaaatgcaaaaaaagcaggcgaacagcaagggcaggaaatggtccgcgccgccaaagaagaagcacagcgcattcatcagcaagcgttggcggaaatccaaaacgaaaaagaccaggctgtagccgctcttcgcgaacaggttgcgtctctctctgtcttaattgcacagaaagttattgaaaaagaacttgacgcaagcgagcaagaccagcttgtccaagagtatcttaaacaagcgagcgaagagctatgagcaacaaggcagtagcaaatcgttacgctgttgctctttttgagttagcggaagaaaaagggcaaacggatgtgtttgaacgggagcttgaactggtacaggaagtgtttgaaacgacgcctcaattagaaacggtgttagcccaacctgggcttgctgctgataaaaagcaagcgctccttcgggatgcgtttcaggctcatctaagtccagcagtgatgaatacgatcaatttgctaatggaacggggccgttattcagaaatcgtgggcctcgctggtgaatacaaacaattaaacgatgacaaaaaaggaattgctgaagcaactgttttttcggttaaggcgctttcggacagtgaaaagaatcaaattgctgccgtgtttgccccaaaagctggaaaacgggaactgcgagttgtgaatgtcgtcgattctgctttaataggcggattaaaagttcgtgtaggcgaccgtgtctttgacggtagcatccaagggcagctgaaacgcctcgaaaagcaattggtagcaggacaataagaacgttagaaactgtcagttaggggtgaaacgaatggcaagcattaaagcgacagaaattagctcgctcattaagcaacagatcgaccaatttgaaacaacggtcaatgtgcaagacgtagggactgttattcgcgtcggggacggtattgccttcgctcacgggctcgacaatgtcatggccggcgagctacttgagttctcgactggggtaatgggaatggcccaaaacctggaagaagacagcgttgggattattattttaggtccgtatacagacattcgtgaaggggacgaagtcaaacggactggccggattatggaagtaccagtaggaagcgagcttcttggccgcgtcgtcaacccgcttggccagcctttagacggcctaggaccagtgcatacaagcaaaacgcgtccaattgaaagcccagctccaggggtaatggcacggaaatcggtccatgaaccattgcaaacagggattaagtcgattgactccatgattccaattggccgtggacagcgggaattgattatcggtgaccgccaaacaggtaaaacggcaattgctattgatacgatcatcaaccaaaaagaccaagacatgatttgtgtgtatgtagcgattggccaaaaagaatcaaccgtttcaggtgtagttgaaacgcttcgtcaacggggcgcccttgagtatacaattgtcgtctctgcaagtgcgtctgaccctgcgccattgcttttcttggctccgtatacaggcgtatccatggcagaagaatttatgtataacggcaagcatgtccttgtcatttatgatgacttgtcaaaacaagcagctgcttaccgggaaatgtcattgctccttcgccgcccgccaggtcgtgaagctttcccaggggatgttttctacttgcactcccgcttgttagaacgtgctgcgaaattgaatgatgacttaggaggcggatccattaccgcgcttccattcattgaaacacaagccggcgatgtttctgcttatattccaacaaacgttatttcaattacagatggacaagtgttcttacagtccgacttgttccactcaggcgttcgcccagcagtaaacccagggatttctgtatcccgtgttggtggttctgcacaaattaaagcgatgaaaaaagtagcgggaacgctgcgtcttgacttggctgcataccgggaacttgaggcgtttgcccaattcggttctgacttggatgcggcaacgcaagctcgcttgaaccgtggtgagcgcacagttgaattgctgaagcaagatttgcatcagccgcttccggttgaaaagcaagtagcaattatttacgcgctgacgaagggctatttggatgatgtgcctgtggctgattgccgccggttcgagtctgaactattcacatatcttgaaagcaacaacaatgaattgcttgagcatatccgcacaacgggcaatttgcctgaagaaagcgatttgaaagcagcaattgaagcgtttaagaaaggttttgtcgcttctaacgaatagacgattagttttgcccagaaaggcggtgaacaaatggcttctttgcgcgacattaaaaaccggataaactcaacaaagaaaacgaggcaaattacaaaagcgatgcaaatggtttcagcggctaagctgaaccgcgcccaagaaaaagcgcaatcgtatgaagtgtatgccaaaaaaatgcgcgaagtcgttggcaacatcgctcaggcaggcagtgatacaagccatccgatgcttgaagaacgtcctgtgaaaaagacaggttatattttgatgacatcggataccggccttgcaggcggctataattccagcttgctgcgcgatatgatgaaaaccatcaatgaacgccacgcttctgaagacgagtatgcgattatcgttcttggccgcatcggccgcgacttgctgcgtacccggaaacagccgatcattcaagagatggttgaggtccctgaccaaccaacttttaatgatgtaagcgggttggccaagtcttcggttgaaatgtttgccgacggtgtatttgatgaattgtatatttggtataaccattttgtgtcaccgatgacgcaacgggttactgaacaaaaactgctgcctcttgcttctgtaaatgaaggcgacgagacaagcagcaccagtttatacgaatttgagccgtcggaacaacaaattttggaggccgttcttccacgttatgcagaaagcttaatttatggcgctcttcttgacgcaaaggcaagtgaattcggcgcgagaatgacagctatgagtgcagctactgataatgcttctgcattaattgatgaattgacgctgtcctacaaccgagcgcgtcaagcagcaatcacacaagaaattaccgaaatcgttggcggtgcagccgcactcgaataaaacaaatgcttattaataggagggaaaacgaatgtcaacaggccgtatcattcaaattacagggcccgtcgtagacgtgaaattcccaagtgggcagctaccggaaatcaataacgcattgacagtcaaccagcaaggcgcagctgatggcgccgttgatgtgaaagtgacgttagaagtagcgcttcaccttggaaacgatacagtccgcacggtagcaatgggttcaactgacgggcttatgcgcggaacagaagtcctagatacaggcggtcctatctccgttcctgttggagaagcaacgcttggccgtgtttttaatgtattaggtgaagagattgacttacaggagcctgtggctgaggggacgcgtcgcgatccaatccaccgcgaggcgccaagctttgaagaactgacaacgacaactgaaattcttgaaaccggcattaaagtcgttgacttgcttgctccatatacaaagggcggaaaaatcggcctttttggcggtgcaggtgtagggaaaacggtcttaatccaagaactaatcaacaacgttgctcttgagcatggcggtatctccgtatttgcaggcgtaggggaacggacccgtgaaggaaatgacctttatcatgaaatgaaagacgccggcgtcatcactaaaacagcgatggtgtttggccaaatgaacgaaccgcctggcgcccgtatgcgtgtcgctttgactggcttgacaatggccgagtatttccgcgatgaacaaggcgcagatgtattgttgttcattgacaacatcttccggtttacgcaagctggttcggaagtgtcggctttgcttgggcgtatgccttcagccgtaggttatcagccaacgcttgctaccgaaatgggtcagttgcaagagcgtatcacatcgacgaagaaaggttctgttacatcgattcaggcgatttatgtacctgccgatgactatacagacccagctccggcgacgacatttgcccacttggatgctacaacaaaccttgaacgtaaattgacggaacaagggatttatccagcagtggacccgcttgcgtcaacatcgcgtgccctttcgcctgagattgtcggtgaagagcattacaatgttgcccgaggcgtgcaacaaacgttgcaaaaatatcgggaactgcaggatattattgcgattttagggatggaagaactgtctgaagaggataaattgattgtagcccgtgctcgccgaatccagttcttcctctcacagaatttccatgtcgctgagcagtttacaggacagccaggctcttatgtgccggttaaagaaacaatccaaggctttaaagacattcttgcaggcaagtacgacgatcttcctgaagacgcgttccgtctcgttggccgtattgaagaagtcgttgaaaaagccaagcaaatggcgtaaatcaatgcacaaggaaacggctttatctgtttccttgtcgcctgattgccgacagaggaggggtacacgtggcaacgatacaagtcagtgtcatcacgcctgacggggctgtctatgaaggagatgccgaattggttgtcgttaagacagtggaaggcgaacttggcatcaaagcaaaacatattccgcttgtcagtccgcttgctgtaggccctgctcggttcatcaaagaagggaaagaagaacaggtcgcggtttcgagcggttttgtagaagtcaggccagaccatgtctctattctggccgaggcggccgaacgtcccgagcaaattgacaccgaacgtgcccgaaaggcaaaagaacgtgccgagcagcggttagcaagtgagcatgttgacagaaagcgggcggaagcagcccttcaacgtgcgatcacaagaatggatgtcgccaaacataaaggcgcataagctggcaacatgtaatccaacgtaaaaatgtcaaaaatcccgtgaaatcgtttaaagattagcgggatttttgacatttttttattgaaaaaccggttataaaacatagcaaaagtggtatgaaaacgttaatggggcctctttcaacaattgcttcattttgtgacaaaacgttcaaaaataaactatgtaaaatcggtaaatcgggacgttaatcgctggcttttttgaaacaaatccgttatgatggttaatggattgcaatcgtttggcttgacaagtgcttgactgcaatcaacagcaagaaatggggtcgtttttttgacggacggattaggtttgggagcattcatacatattgtcgtgaatcttctttgtcttgtaatcgcttggtgggctcttgagtcgtttcgcttcgatctgttcgttaaaaatccaaaaagcaaacaagctgcgttgcttcgagtcatgtgtgcgattgctcttggtactttagtcgctcgctttctccttgattactttcaagcaacacaacttttgccctatttattttagtgaaaagaaccctcatctttcatgtatgcattttctccaaaaggtaaaaatggtactaataagaccatggcgttaaagggagagaacgtacatgcaaaagatgataaaagcgggttttttagcgtttgtgattgggatttgcggtgcaatggtttttgcgccactccatgaaaaaaacaaggatcaattgctttttgcgaaagcagaagcgatgctcgaattagcgagacaggaacaattgcatgtcattagttggcaagttcgagcaaaaggaaatgaagaagtcgttcattctaaaggcgagtatgagcaaaaggtcgatgcctttgcagccgagcatccaacttttgaacggcaacctttggaatcaaatcaggacagttggagtgaagtgttcattcaggatagggggaacggcctgcaagaagtcgttaagtggcttgctgtaaaggacgaaggccaaatcatcctgatgaagtcgtacgagcttatagcgagtgccgaagaatccgttttcgatcaagcccttttaaaggaacgcctgaaccgtttggaaatggagtcagctttgcttttttaccaattgacagctgaaacaaccacattaaatgacgattcgttgttcgcaactggcaaacgttacatggagcagcttggggcaacaatccaagaagtgctgaaagaagaaacgtttgtgtctttgtctgcgtacaataatgaatgggacactggaattgctttagaaaacggaaacaacatgaatgttcaagttgccttgagacaaaacccagacttgggccagcagacaagagtaactttaggaacgcctataattacgactgaatattgataatatagaagagaaaaaatactgacgcggaggggaatacgttggaaaaaatcattgtccgtggcggcaacaagctgcacggctccgtgaaggtagaaggcgcaaaaaatgccgttctgcctgtcatcgcagcatcgatattagctgagcgtggtgcaagcatcattgaagaagtgccatcacttacagatgtatatacaatgaaggaagtattagcgaatttgaatgtgggagtcgaatatgaaaacggccgttttgccgttcgtgcagaccgcccactaaaaaccgaagctccgtttgaatatgtgcgcaaaatgcgtgcctctttcttagtgatgggcccgcttttggcacgtgtaggccgtgcgagaatcgcattgccaggcggttgtgccatcggttcacgtcctatcgaacagcatctcaaagggtttgaagcgatgggagcaacggttgaaatcggaaatggctttattgaagcacgtattgatggaaaactccaaggaacaaaaatttatttggatttcccaagcgtgggggcaacagagaacattatgatggctgctgttttggcagagggaacaaccatcattgaaaatgtcgcagaagagtcggaaattgtcgatttggccaattaccttaatgccatgggtgcaaaggttcgtggtgcagggaccggcgttattcgcattgacggcgtagacgctctccaaggagccgtccactccgttatacctgatcggattgaagcaggcacttttatggtggcggctgctattacaggaggcaatgtgtttgtcgagggagcaattgctgagcacatgcgtccccttgttgccaaaatgcgtgaaatgggtgtcgatattattgaagaagaagcaggtctgcgggtaatcggccctgaacagcttaaggctgttgatattaaaacgatgccacatccaggttttccaacagacatgcaagcgcaaatgatggcgttgcttcttcgggcagaaggcacgagtgtcgttacggaaactgtatttgagaaccggtttatgcatgtagaggaattccgtcgcatgaacggaaacattaaaattgaaggtcgctcagcaattgtatctggaccgacaagtctacaaggcgcggaagtcggagcaacggatttaagggctggtgcagcgcttgtgcttgcgggacttgttgctgacgggtatacacgtgtaacggaattaaagcatttggatcgtggatacgtcaatttaactgagaaattgaaagcactaggcgcagacattgagcgtgtggaagagcatcaagaaaatgagtccttggaagcagctgaactaatctaaactatttccggggaaatggtcgaatatcgtcaagaaagattgtttgccattatggagtatgtcacatttgctgacatactgtctatggtcgacaatcttttttgcatacatttctggggcagacgttcatagactatagtgttggaacaaataatggaggtctgccatgaaacggataatcctatttgcagcaatgctgatcgtcattgtgctaatcgttcccactgtaatggttgcacttgtaaaagacggcgaagatttaaccgagtcagcttttggactagccccgatcgagaaaaaacaagaagcaggacaaacagaagtacgctctgagcaagttgcagcgaaagacaccaatggacctgacatcgccgtttatcgctccaacgctgaagcggtcgaacaaatcgctttggaagattacgtaatgggtgtggtagcgtctgaaatgccggctgactatgaagtggaagctcttaaggcacaggcgttagccgcaaggacatttgctgtcgcgcaaatgaaaaatggcgacaaaaatggggatgttccacaaggggcgttagtaacagatacagttgcccatcaagtctatcaaagcaaagatgaattaaaagagaaatggaaagactcgttcgactcaaactgggagaaagtcgaaacggcagtacgggacacgagcggggaaattatgacgtatgatggtgaaccaattactgcctcctttttttcaacaagcaatggttttaccgaaaatgccgaagattattgggaacaagaagtgccttacttaaaaagtgtaccaagtccatgggataagcaatctcctcgttttgctaatgaaacagtcattcctataagtgaatttgaagctgctttagggatcacactccaaaatgatggttcaattggcacgattgaagcgagaacagcaggcggacgagtggagacggtaacgtttgaaaataaaacattgtcaggccgagaagtccgggaagcgcttgaactggattcatctgatttttcatggcatgtaagcaatggccaagtcgtcatacaaacgaaaggttggggacatggcgttggtatgagccaatacggagcaaatgggatggcccaagaaggaaaaacgtacaaagacattgtccaatatttctataaagatgtcgaaattgaaagcatggacgaacttgtcccgactagctaaacatgcaagccgattgcaacacgattcatagagtagaagccagcagcctgtgaacaagggctgctggctttttcggcagcggtggtgtggcgcgaatagctttggaaaaattttttcctttgccatgtatatatttctagcaaagtgctcagaatggttggcagaggtgatgagaaatgaaagaagaaaaaaattcttctaaaaaagtcgatatccaaagttttatgcgcaaacgttgggttatgcctgctgcttatttggttgttggcgccggtctcttaagtgctgttttctttttgcaaaatggggaggatagcgcagatccggaagaaatgccagtgcaagagcaggaaaatcggcaagatgagccaactgttcctgttaatgtcggtaatgagacattgcatatgcctgtggcgaacgaatctgattttgagcaagtagggttcttctacgatccagaagccgatgcacaagagcaagaacaagcgcttgtattttatgacaatgtttaccgccaaaataaagggattgatttagcaagcaaagaccaagaaacgttccctgttcaggcggcaatgagtggcacagtgacgaaagcgatgaaggactctgtcctcggttatgtagttgaagtcgatcatggcaacggcatcaccactcactactctagtctagaaggcattgaagccgaacaaggcgcagaaattagccaaggcgatgtaatcggaaacgctggaagcaatgtgtatgatgaggaagcaggcgtgcatgttcactttgaaatccgcaaagacggagtggccatgaacccttacgatgcgtttaacaaatcactagaagacatcaatgatgcgtttcctttaggcgaaaaggataagaaaggcaaagagaacgaagagcctgatgaaaatgacaaagccaaagaaaacgaaaaggataaagccaaggaaaacgaaaaagacggtgactctaagaaagataaagacgagaacgacaagccggctgaaaataagccaaatgagatcgaagaataaacctttgagcgcctaaaaaggtgctctttttgtttactgtttttatgctccttgatgtgcaggactttgttcttgagaggaaagccactccgtgctagactagagtaaaatgatcgcacaaatgcgcctagggttccgcttcatttgtaagggctggtccgagaggtgcacacggcgtctgccgtgacacggagggataaaagcccgggagacattctatgaatagctcctgggctttttgtgtgcgtaagaagtggaggaacaaatgagtaaacactggatattcattgtggtggccgcctgttttgagatcggctgggtcatcgggctgaaacatgcttcaacgatgatggaatggggtttaaccgtagtggcgatacttgcaagctttgtcctgctaattgccgctacagcaaggttgcctgttgcgactgcctatgccgtttttgtcgggctaggcacggcagggacggttattgccgaaactctcctgtttggtgagccattcgagctagtcaaggcactattaatcggtttgctattaactggcgtcatcggcttaaaactggttacgccaggggagaaacctaaatcggaaaaaggagtaagttgagatggcttgggtgtatgtgattgtggctggtttgttagagatgtttggattggcgatgatgaaccgttttaagatcgaaaagacgctgttgccattggggttgcttgtcattggtttttcggcaagtttcttccttttgtcactcgcaatggaaacattgcctatgggcacagtttacgctgtgtggacgggaataggggcttttggaggagcggccattggcatgtttgtttatggcgagccgaaaaccgcttcaaggatttttttcattttcctaatattaggttcggtcattgctttaaaagcagttagttaaccaaacgaacatgtagccttgttatcttttgtacacttgataagcgtgagcatggaaatgaaaggaagtaggccaaagagtcaagaaatgaagcttgacctatgaaaagatggtataacaaggacgcctccctaatacactttaccaatcacccatacagaattagggaggcgagtcgtgtgcacgattacatcaaagagcgaactatcaagattggcaagtacattgttgagacgaaaaaaacggtgcgaaccatcgcaaaggaatttggcgtctcaaaaagtactgtacacaaggatctcaccgaacgtttgccggaaatcaacccagagcttgcaaatgacgtaaaggagatacttgagtaccacaagtccattcgccacttgcggggcggtgaagcgacaaaagtcaaatacaagaagacaattgaagtgggagaccagccaatcgtaaaatcacggcaataaaatttcgacaaattcttcttttctcctgtgtttatggtactatttatactaggcatatgtgcgcgtttcaattaacctatacgtttgttcgatacatacttaaattcatctaggcgcacaactattcgttactatttacacgttaaggagaataaggaggaaatcgatgtatgtttggccgtgatattggaattgacttagggacagcgaatgtgcttatttatgtgaaaggcagtgggattgtattagatgagccttctgtcgttgctcttgatacgacaacaaaccgcgtccttgctgttggagaagaagcgtttcgcatggttggacggacaccaggaaacattgtagccattcggccgatgaaggatggcgtcattgcaaactttgagatgacagagtcaatgttaaagcactttatggataaaattcaagtaaagggttttctttcaaagccgcggattttaatttgttgccctacgaatattacgtcagttgagcaaaaagcgattcgccaagcagcggaaaagagcggcggaaagaatgtctatttggaagaggaaccaaaagtggcggccataggagctgggatggatattttccaaccgagcggcaatatggtcgtcgatataggtggcggcacaacggatgtagcagtgttatcgatgggtgatgttgtcaccgcctcttccatcaaggtggcaggggatcgttttgattctgacattttatcgtacataaaaaaagaatacaaactgttaattggagagcgaacatccgaagaaataaaaaagcaagtggctactgtttttcctggtgcacgttcagaggaaatggatatcagaggtcgcgatatgataagtggcttgccgcgtaacatcaccatttcgacgaaagaaattgaaaaagcactagtcgagtccgttgaatacattgtccaagcagctaagcaagtattggaaaaaacacctcctgagttgtctgccgatattattgataagggcgtaatgttaacagggggcggagcgctgttgcatgggatggatacgttgcttgcagaagagttaaagatccctgtattaattgcagaggagccaatgcattgcgtggctaggggaacaggcattattttagaaaacttggacaagatgtccagtaaaaaagttcagttgtaaaggaggaacgggatgttaaaagggctatatacagcaacaagtggaatgcttgctgcccaataccaccaagatatgctagccaataatttagccaacgcccaaacgcctggctataaagcagagcaatcggtttccagggcctttccgacgtttttaatggaagcgcaaagtgtttctaaggcaggcactgtgcaaaaacaagggcttggcagtttagcaacagccgtttatttgcaggagcaacaaacgaatgcccggcaaggcgatattcaagaaacaggcaatacgactgatttagcgcttctccaaacgggacttgaggagaataacgctgtcttttttgctgtgatgacggaaaatggtatacggtatacacgcaatggcgacttgcaagtggatagccaagggcggctagcaactgcaggggggcatttgctccaaagcacagaaggcgggccgattcaagtcgactcagaggctttctcagtcgatgaaagtggagctgttgtcgtggctggcgaaaaccggggtacaatagaaatcgtattagctgacgacaccaatgagttggaacgggaaggcgatggcttgtatatgctggaaaatggagagttgccaagcgcccacggcaatccagacattgatttttcgattcgccaggcagcgattgaacgcagcaacgttgacacagcagcatccatgaatgctatgctcagtgcttaccgattatttgaagcgaaccaaaaagtggtgcaggcatatgaccaaagtatggacaaagcagttaatgaggtaggacgtttaacataggggaggacgatcaatgagtattgggcatacagccgcagctacgctttcacagctgcaagcaaagattgacacgatttcgaacaatatggccaatgcggaaacaacgggctttaaacggcggtctgcttcgtttgcggatgttttgacttcagagtatttgaaccaaccaaatgaaaacagacagacgccccatggcttgcgagtcggcacaggcgcgaagttagcacaaacgcaaattcagttagaacaaggtacgttacgtgaaacaggacgcgggctcgattttgccttgaccgaagcggatctcttctataacattgagaccgtagcaggtacgaggcttacgcgtgatggcacgttttacttttctccacaggcagtaggcaacgggttggaactcgtaacgagcgacggcaaccgtgtgcttgacagcgatggagaagcaattgtcatgccaggggatacggtttccttggaatggagggacggcaatttgtttgctcaactgcgtaacggaggcgaacagcaagttggttcttttgcgctaacacgtgtgttgcgaccgcaaacacttgaatctggaggcaacaatttgtatgttcttccagagcttccaggcgtttcagaagaagtggtggccgcagacgagcatatgaaacaaaacatgctcgaacaagccaatgtcgatttaggcttggaaatggctgaattgatggagacgcagcgcctattgcaatttcaagcgagggcttactcgtttgcagatgatatggctggtctagcgaacaacattcgccgttaatggagtgaggaggtggcgtgcttggctcaagacggacaaaccaaaaaagcagatgagcctttgcaacaaggcgaggaaccatacgatgttgaaacagagcaggcagctggacgccttgatgtgtcgccgaatgccacccctgataaaacagacgacccgatggaagagcgagaagaaaggcacgccgctgatctctataaacgtgaacggattcgcctgttccctatttggctgcgcctgattgtcgtgatggtgctggcaggtgcatgtttgctttgtgggcttgtcattggttttggcgtcataggcgaaggggagaatatgtgggatgtcctcgatcccgacctttggtaccgcatcatcgataatattcaaggagactgagaaaaacgcagtcttcttttttgtatgaatacgaccctccttcgcatactaacagaaaaagaagggggtgtccgtttgccgttttttttacataagaaaaagaaacagccgacatttcctgtactaactactcttgcggaagttctgcaagcggcaaagcaatcaagcgattttgtggaacaagtggaagcaagtaaggatagggagccgattcatgtctactattatcaatctttaatagacatggagcgcattgccccaaatgtgcttcatccccttaaacaagtcgacggcatttccaacaaagcattaaaagaagcattgtatagcgccgaggtggaacagcttgaggacgcaatggaaatagaaaagcggctattaaaagggagcgtacttatttcttttaaggaaaagggagcatggcaaaactggttagttgatttggcttacatgaaaggccgggaaatgaatgtccctgaaatagaattcagtgtatttggctcgaaggaatcatttattgaagcagtggaaacgaatctagcgttgctgcgcaaaagaatcccttcgtccgatttgcatatggttaaattcgtcgttggaagcgaaacgaaaacggacgtatacgtcatctactgtgcctcgattgccaataaagaaaatgtccaaacggtgaagcaacgaatcaaaggcttgcaaattgatcaagttcccgactcatcaacgattttacaagtgattcaagataataacaattcagttttcccgcagctcgtcgatacagaacgacctgatcggacggcgggggcattgcttgaaggaaaagtagccgtgctcgcagatggatctccgcaagcattgcttgccccggtgacggcgcttgaattcattgtcgcctttgaggattatttattatcttggcatacagcctctatgctccggattatccggataggcgcagttttgttttccatttttgcaacgccgttgtatgtggcggtattatcctaccatccggaaatgattccccaggatttgtttgcgacacttgtcgtctcacgcactgcggtgccgtttccgcccattatagaagcgttgtttttagaagtaacgatcgaacttcttcgcgaagcgggagcaagactgcccacaaaaattggccaaaccatcggcattgtcggcgggattgttatcgggacggcagcagtagaagccgggttaacgagcaatgtcttattgattattgtggctctcgctgcccttgcttcttttactattccagtctatcgcatgggcacgacgattcggattgtccgctttccgtttatattggctgcccaaatatggggattgatcggcattgccattatgttgatctttactctgtgccatctgctttcgctgacctctttaggaaggccgtatatggagccgatctatccattttccttcaaagacatgaaagactctgtcattcgtttaccgatttcgcagcaaacgatgcgtcctcgttttttgcaagcaaagcagcaaaagcgtttcttcccgaaacacaaccgacagcaaaagcctgatattgatgacggctattaaaggaggaaaacgattgtggctactgaactgccaagcagcgtaaaagtccctccgtacatggcgttttttcttgtgcatggtatgcaggtcggcgtaggcatcctcggcttttcacgctatattgctgatgtagctggctatcgagcatggattgccgttctgcttgccggggcggtgaaccaactcattatttggatggcttttcggataatcagcaaagcggagagcggggatctctatggggtggcgaagcaagcgtttggaaggtggggcggcgggctcgttgtgtttctgtttgtcttctatttcgcaatgctggcagtcgtcgtgttgcgaacttatatcgaagtcatccaagtatggatttacccagaattgatgacttggtcaatggcactgatcattttattggtggagtactatgcgattgtaaaagggtttcgggtagtggcaggtttaaattttatatttgtgcttataccgacccttttatggccaactgtgctgcccgtacttgaatttgcagagtggtaccatttgacccctttgtttgacactacgtggaagaaacaaatagaagcagcgctcctgttgacgttaagtttttcaggtgcagaattgctgcttgtgtacgcgccttttttaaagaagggcaaaggactacaactttcagcccatttaggttcagcatttacaacgctcgtctacttgctcgttgtatttgtcacctttctttattatagccacgaacaattgacgctcaccatttggcctacgctaagtgcatggaaagtcgtgtctctcgtctttattgaacggatcgagtatttgtgtatcgcgatatggctgactgtcatctttccaaacattgcccttgcgatttgggcaagcagcaggctattaaaacaacagctcggtgttcggcaccgcacgacggcaaaagtggttgtttttcttgtgtttatcgccaccattcaattcgatacgcgcagagcgatcaatgcgttgaacgatggaatgaattatgtcggtccgctttttattttcggtcttcttccacttttatgggctgtcagcttgtttttgaaaaagaaaggggacgcttcccatgtataaggccttgaaagtatctatgctggcgcttctccttttcttgccccttttctccgtcgtaacgacaagggtgatcgatgagctccaattgatctcggtcattggctttgataaagggggagagggcgctataaaagggactgttagcttgacctcatattcggttgaagaagcaacgaaaaatacggcgctgtcagcggaatctaattcgacgcgagcgctccggctgaaatttaacagcatgtcttcccgtccactccatggagggaaaatatcatcgattttgctagaagaccagttagcggaaggcggcatttttgatgtgcttgatacgtattaccgcgatccgactgtagcaacgaaagcgtatttgagtgtgaccaatgggacaacgcaggggctcctaaatgtgcaattcccattgcaatctgaaattggcgcctatttaaaagacatgctcgaccataacattacacaaggcaacttgccgcaatcgaatatgcacttgtttatgagggcttattttgaaaaaggccatgacccgtttttgccgtacctttcctatagcgagcgaaatttgcaagtagatggaatagctctttttaaacaggaccgtttaattgatacactgaacttagaagaatcgtttttgcttaagttattaacggatggttatcaaagcgggggcgtgcttgaagtgcgagtggatgagggcaaacatgtcgccgttttgcgtgagctgcgctctgatgctgatgtgcatgttgatttaaaaacacggacactattcattgatgtcggattgcggacacgacttagtgaatactcaggcgggcttttggaagaagagaagttgcaacatattacttcagaaacaaatgcttccttgcaggaaggaatgaagcagcttttgcaaaacttgcaggaaaaagaagtagatccagttggttttggcgccagacagatcggaaagaatgggctaaacgaagaagagtggtaccagctatatagcacgctagctgtcgatgttcgagtaagtacccacattgtggaatctggtgtcagccaataacagtttcaaaaaggagactggcgatcaaaaaagtgcctactagacgattaaaatgaaaggtgtacaatagtacatgcgaccattattcgtaactaggaggaacttgtaacatggcaacagtgttaatgataaatgcaagcgaccgtcttgaacaaggcgtgagcgtgaaaatgtataatcaatttttgaattcgtataaggaagcccatcctaatgatacagtggaagagctcaacttgttcgctgaaaaacttccttattacgggaatacagcaattaccggccaatataaaaaagcgcaaggcgtggaactgactggcgaggaaaaagaaatcgtggagacgattgaacgctatcaagaacagttcctgaatgctgataaagtcgtctttgcctttccattgtggaacttcacagtgcctgcaccgcttattacgtatttgtcctatcttgcgcaagcaggcaagacgttccgctatacggaaacgggcccagttggactcgttggttctaaagaagtcgctttgttaaatgcccgtggcggcgtttactcgaacgaagagatggcagctttagaaatggcggcaaaccttgttcggacaacgatggcattctggggcatcactcaaccagtagaagtcattattgaaggccataacgccgccccggaccaagcagatgcgattatttctgaaggcttggaaaacgttaaaaaagcggccgttgccttttaatagaaaacatgcgccagttgccagtcaggcaactggcgctttttcaattatgccctgtatgcgcgtgcccctttatttcaataacccatcttttcgcaacgacaaaagccagttgtcgatgcaacgatcccaataatcccatgtatggccacctggcccttcagaatagactaaagacgcgcctacttgccgggtctcctctagaaaagaggtatttatatcatacaaaaaatcctccgttccacaatactggtacaggtgcgggagtttgattttttcggcgatgcttgttttcagcaaagcgattaaatcgccccctgattgatggagagaaagggattcgccaaacacggctttcatatgggggattctctccgggataggtgcttccaatagactttttaaatcaagggcgcctgaaaagctagctgcggcctgaaagcgctcagtattgtgaagcgcccatttgaatgcgccaaaaccgcccatcgacaatccagcaacaaactggtcttcccgtttgtccgagaatgggaaaagccgggcaagccgctcaggcaattcgtctgctagaaaggtgaaataagggctaccgtaaaccatatcggtataaaagctcaagtcgacattcggcatgacaacagcgatttgctctcgaattgcataacgctcaatgcttgtttgccgcagccaggcagaatggtcgtcgctccacccatgaagcaagtataatgttttgaagggcggcggcgcttcatcgggcaaaatgatcgccaagcttgtttgttttcctaatgtttgggaatgaaactgcatcgttatgagagccattgattaaacgcctccttaacctaattatagcctatttgaaatcgctttcatagaggggtgctgccgatagccaggcaatatggtaagataaagcgggaaagattcgaaagaggaggcgatccgatgttaacggttgaagaaattaaagcccttatcccccaccgctacccgtttttgcttgttgataaagtgattgagcttgaagcgggcaaacgagcggtcggcattaaaaatgttacgatcaatgaagagttttttaatggccattttcctcattatgcggtgatgcctggtgtccttattgttgaggcactggcacaagtgagcggagtggcaatcgcaaaagcgcaggaaggaacgaacaaagtcggcttgtttgccgccatcgacggctgtaaatttaaacgccctgtccggcctggagaccaactgcggttagaaactgagattacgcgtgtaaagggcccgattgccaaggcgactggaacggcctacgtcgatggagaagtggccgcacaagcagaaatgacgtttgcctttaaagacgtctagaaattttacatcttttttgttgttctttcagatgcgattcaagagaataaacccttgccgtacaagggtttgttctcttttgtgctcttcgtggataaatattgtctattttgagtcgctcatgtatgattaggaaatactaatgttactgatggaaggagtagggtggtttcaatgaagcaaattagccaaattataaaacaagatttgcgcaatataaagcgcgttccgcttgttgcgcttttgcttgttggcttggcattcttgccgtcattatatgcttggttcaatgtcgctgcttcttgggacccttatagcaacacgaaccaaatcaaagtggccgttgtgaacgaggatgctggcgccgaagtcaacggagaacagtttaaagtcggagatgagcttgttgaaaatctcaaaaagaacgacaaaatgggttggacgtttgtcgatcgagccacggcggaagaaggagtcaaaaagggcgattattacgcaagtgtgtatataggcaaagatttttccgaaaagttgacgagtgtccttgacggggagccagccgctcctgaagttcgctatacagtcaatgaaaaactgaatgcgatcgctccaaagatgacatcagcaggagcttctgcaattgtcgaggaaatttccgagcaatttttagaagaagcatctactgctttgtttacggaatttaacgagattggcgttgaacttgagaatgaattgccaacgattcgtaaaatcgaaaacaatatttttaagctagaggaacggtttccagaaatcaatgagctaggggaaaaggtgcttgaacttcaaaacgactggccggtgatcaaggaaaaagtcgaaagcgtcatcgggatgacggaacatttttcagacataaacgaagcagctgggtacgtattggagattgaagaacgattgccggaaatccatacgcttagcgagcgcctcgcccagttggaagaacggattcctgaaatagaggcggcagcggacaaacttgtagaaattggcggccactttggcgaagtggaagagcaaataggggaagcgctcgaaatcgttcagacagcccaggaagcaattgggcgcgctcaggaggcgctgccacatgctgcggaaatggccgatcatgcacaagattatttagaaggcgcccaaaatgtcctgaatgaagtagaaggggcgatcgatcctcttgttgatgtgatcaaccggcaagcaagctttgtcgagcaaggcgcaaacgcagtcgaggccgctctgtcaggcgattcatcggacgcgcttttggaacagcttcgttcagccaatgaggtgcttgctgcaaaagcattaacgcaagcgatcaactttctcagtgaattaaatgaaccattgcctggaaaagagctaagtccggcaattgagtccctttccgaagcacgagacaaaacgagcagtttgcaggaaaacgttcaatccgccatcgctacattggaggcaggaggagagcttgattcacaaacggtagagtctttaagagaacaagcgcaagcgacggctcaatctgcccaacatgttcaacaatacttggcgaacggcggggcagacgtcattaaaggggccgttagccaattaggccaggcggctgaggatgcaggcgacgatttggccgctgctgaagaacgcctccctgatttagaggagatgttaaatcaagcttcagcgattagcgtaacaggcgaagaacaactcaacaatttgctggaagagttgcctgccattgaagagcgtgtcaatgaggcgattaacttagttgaaaatggactgccagaagtgattgcgaccattaagggcatcaactcgtttatgagcaatgattttccagcaattgaggaacgaattcatgaggccgccgattttattcgtgacgatttgccatcattggaagaagaattctctgagatggcagaaaaagttgaggaagctcttcctgaatttgaagaagcgttaaaccatattgctacatttgtgaatggggaattgccaggattagaggagaccgttggcgaagcagctgaccgcatccgcgagtttgaagaaaacaccgatcttgaagaattgattggattgttgaaaaacgatattgaaaaagagagtgcgtttttcgcagaaccagtcaaactaattgaggatcaattatacgccgttccaaactacgggtcagccaatgcgccattctatacagccctttctctgtgggtaggcgcgttgctgttggcgaacttgttaaaaaccgatgttcacccagttgatatgagggaagaatacaaggcgcaccacgtttatctaggccgcctcgtgctgttcttgttagtcggtttcttccaagcgctcattgtgagcattggcgatctccttgtacttggagtctatgcagcccatcctgtttggttcgtcgtgttttccgtactggttggttccgtttttatgacgattgtttatacgctagtgtcggtttttggtaatatcggtaaagcgttggccattatttttatggtgctgcaattatcaggtgccggaggaacgtttccaatacaagtggcaccgccatttttccaagcgatccatccgtttttgccgtttacgtatgcgattaatttgctaagggaggcagttgggggaatcgtcgctgaagcagtctggatcaatattggcgtgcttgccctctttcttgtactcgctctgctgttcggcttgttgttgaagaagccacttgccgagcgaatgcaaaaaacaacggaaaaatcccggtcgagccggatgattgattgatttgagcaaaggaagtgggaaacctcttcctttgctttttttaacgaggtagtttcctttagcaacgatttctaggtataatagaaaagcataaaaggggagagggcaaatgaggataactggcactaccgtttacttaaggcctgtgcaaaaaaacgatatgagtagcttttttaatgcagtccaagatgaagaaatacgctatatgactggcacaacaaagacatttacaatggagcaattgtatgaacactatgagcgaatgaccaatgatgagcatcgctttgattttgcgatttgtttgctcaatagtgatgaggtgcttggcgatttatcgattttagaaatcgacgagaccaaccaaaaagccgggtttagaattgccttgcatcatcaacatgttttaaataaagggtacggaacagaagcaatccaattagcacttcggtttgcctttgagcaacttaaactaaaccggctacaattggaagtattctctcataacaagagaggcataaaagcttatgaaaaagcaggttttaaaatagaaggcgtattgagacagtctctttatctgaataatcaatactcagacgagatcattatggcaatgatacagacggattacaaggagcttagagatacttgaaaaaaacataatcggtcggcacgcctgttagccccagttgccgcagcattgccgtgatgttgccgcgatggtaagtaccatggttggcgacatggaaaacgaggtcttctaatggacaaaccaacttgccgaaccgtcggtgttcaatttcaatcggccggctaaggtcgttagctgcgaaaaattgtctaaagttttgtgctatttcttggtaagcttcctgataaacggccaaaggggcaccagccacttgcttgcttttttcggtttttatttcgacgatctcgttaaaattttttccctgcatgacattaagccaggtaatgtctgctgtgtaaatatgggtaagcacttccgctattgaagaaaacacgctcgttacttgacgcgttaacattccttcttcctgggcgctcaggtgggcaaaaacttggttgttcgcccatacgtggtaatcatataattggctcgcgttcatacgtccagctccctctgttaattgacgctacatactaattcgttacgggacttcaaaaaaccttctcaccgcatgccgttttaggcttgtttagcaaaagggtcaattccgattttagtgagtgcagcgattgcttgccgaacaggcaaatttggcaagttaaactcattggccagcacgtcttcaatggcttcaacggaagagagggtcgtcgttgtccgttcaccattgcttttactaatcgtaaagcggttattaacaagcgagacgcttctttgttggtgaagctggtacaattggcaacgcaacagccccatgaatgtcgctgttggctgataagaagcagaaacgagcccttggaaatcagcgatttggtagcttttctcctgttgaaaagaccacgtttttccagtctgtgcgccattcaggtagcgtttgtaatcgaataaccgatcttctctcgcggtaatcgcaacgacatcattgccaaatgtgcgttctgtttttggcaagtgaagaggcactgcttcaaagaatggggctgctgcgccacaatcgacgtaataacgagtgccgtcgagcaatacgattatgcctatgtgttcgccgccaagcatagccagttggctgttaaaaccgagttggttcaataaaagatggacgtttccgttcattgaataacaagttccgccagcatcgagtgtgcggcgcgcttgaagaaactcatttacagaaggcaatccttccatcccgtttagccaacgggccaatttgctcatgttctcaaacgggaatgtttgcaagtgggctgtacaaatggcattgagaaaagggagtgaaggcggttgccgttctagtcccaatagctgcaaatagacttttgactcggccatttttaaatgacctccttttttattttagcgtaacaggacatgcctttagcgtcttcagctttttggtgcagtcgcccctccgtcttttggctgagaaatccgattaagaaattttcccaacctgtgcctgaaaagcgggaaaagcccgcccagtcttgatttttacataaaaggatagaggggtaagcacttttgtaatattacatttcaattacatcggtagtccagccgccatatttcgtttaaaatttacattccatagccgatataattcacgaagacaacattctgtcgaaaaaggaaaatgaatggaaaatcactttagaaggaggcattttcttggcacaatctactttcaataaagtgctgttctcttctgccgttgtggcggggattgccgtagtcgccccacaagatgcagatgcagcgctcggcgaccgtacactccgtcagggcatgtctcatcccgatgtgactgaactgcaaaatgctctaaaagaaaaagggttttttacatacggcactgctacaggctattttggcacccatactagagatgcagtaattgcttaccaaaaagcgaataaccttcttgttgacggggttgctggcccacagacgctaagttctttgacaggcgcggctgtatcagcaccgaataacaatgggaataaaacggctgatacgcagccatccagcaagacaagccttctgcgtgtaggtagccgcggcggcagtgtgacagcgttacaggaggatctacgaaagctcggcttcttcaaccaatctcctactggctactacggcacggtaacgcgtgatgcggtgcgtgctttccaacgggcgaacaacttgcaagctgatgggatcgctggaccagccacacaagcagcgcttaaaaacggcggtaatcgtgcttcagaaaatgataccccttcaaaaagcaagcctgcttcgtcaacgggctcgcttcgtcttggcgatcgcaacagccaagtgaccgatttgcaaaatcagctgcgctcccttggctactttaatcagaatgcaacaggctattatggtgaggtgacccgttcggctgtgcgtgaattccaaaaaaacaatggcctgtccgctgatgggattgctgggccgcaaacatttgcgaaacttagcaacagccctgcccctgtgaacaaaaaccaaacggtaaacaacaatcaacctgctcagacgaaccaaaacgcaagcggacttgtttcaggcttgatctctagcgcacagtcggccattggcgtcccgtatgcttggggaggcacttctatgtctggatttgactgtagtggatttatccaatacattttccggcaaaatggcgttagcgttcctcgaactgcttcggaacaatggaataagggaacatccgttagttcaccgagtgtaggcgatgttgtcttttttgaaacctataaagccggcccttctcataatggcatctatataggcgacaataaattcattcatgctggctcttcacggggagttgaagttgctgacatgaacaatagttactggaaaccaagatacttaggtgctaagcgccttcattaagaatcaggcttttgcctggttctttttttgctctgacaataggagagcaatggcaaaaaataccgaacgtctattcgtttttttctcttgaatagggaacgcacattcgcatatactagaatcagaacacaggggagggcaacaaacatgaagcgggcaaatgtcatttttcttgttgatatggaatcgttttatgcgtcgatcgaacatgcggccaatccccagtacgatgggcgcccccttgtcgtttctggggacgtgaatcggagaagtggcgtcattttggcggcatgcccattagcaaaggctaagggcgtccgaaatgctgagcgcttatttgaggcgcagcaaaaatgcccagacttagttgttgtgaaaccacatatgcagcgctacgttgatatttccctacaaatttcaaaaattcttggcacgtttaccgatttggttgagccctattcgattgatgaacagtttatggatgtgactgggagccaaaagttgtttggccccccttatgaaatagcagaaaaagtgaagcaagccattatggaccgctttggcgtaaaggcaagagttggcatcggcgaaaacaaagtattggcaaaactagcatgcgacaattttgctaagaaaagcagtgaagggatttattggcttagaaaagacagtcttgatcttgatttgtggtgcttgccgattgaaaaactgtttggcgttggccggaaaatgagcatccaccttcgcaatatggggattcgaacgattggtcaactggcgcaaacggatggcgcacggataaagaaacgttttggcgtccatggccaagttttatggatgtcagccaatggcgaagattattcacctgtaacaagagccgcccatgcccgtcgtaaagggtatggaaatgggatgacgctgcctcgggactatgtgaaaaaggaggacatttgtgtcgtgttgcttgagttatgcgaggaagtatgcgcgcgtttgaggcaggatggctggatggggagtacggtttccctaagtgtcaatggtgccgatttcgttgaaaaacgtgggtttcaccggcagtatacgattccttttgaaaccaacattacaatggaagtatacgaagcggcgtgcacgttgcttgaacggttttgggacggttatccaatccgccgtttaagcataggtgtgagcaacttgcaaagtgaccaaaattggcagcttagcttatttgacgacaatgcgagcagagatcgtctgtcaacgattggttatgtgatggacggcatccgccaaaaatatgggaagctcgcgatccagcgtgcttcttcgttgcaaaaagcgtcacagcttcgagacagaagccaaaaaattggcggccattataaatgagccattcaaaaaagctccccgtgctaagaagcggtcgggaagcttgatattttcgctttatttcactgtttgcttttctgtggccgttgcaaggcaggcaagaagttgttccaagacaagggaatcaatcgcttgttcgcttgtgtggaccgataaatcaagaatacgaccatctgccagttctttaatgagcgtgatactgctaaattcatcttcactgttcgcgtcggcgaaggcgtaatcataccaatcgagagcatcggttagcggccacttgatttctgtgcgtgcagaacggagcgcattaatgtgcatatcggcaggtacgtctggatgggcgagaccgataataatggaaatcggcgcaaacagttggttttgttcattccaaaaactataagactggtcccctaaacgacgcatttggtagccttcaggcaattggatctcaagtgtgtcaaacagcacaaaggtatgggcaagaacggaatgggcttccccgtcatagaagaatggcacttccgcaactgggctttcttcaggcgtgtttgcttcggcgctaggcttgccacttaatttttgagctaaaggaacggtagccaagtcctcatcaatagaatgctcgcctttgtcgctttcatgattagcagaaacgagaatcgcgtggaacaagctgaccgcttcttcataagcttcgctgtcctgttcccttaaatcggcaggcaaagagagcgcagctacatacatatgatctcgtttttcatcaaagcggacaagacgatgaacgatgccatggctgtcatcaacggtcaaataataatcaaaaccaagctcaggaaaccaatgtgtatcaatttccacaggctcgctttcgttggaacgaagagcaagtgttgtgtaatcatggcgcaacgtccaatctttatcggaagggagcggctccgtgctgacggaaacttgaaaagaaggatcttggtccgacacaaaagttagcatattggctgtttcaacgacttcaaagccctctggtactaaataggttttatcaaacggagctgttgctgcccgagcggaaaggatgtcggttttatccccgttgacaactgtcaacgcttgttcctctggctgttgttcctcagaggcaccattgccttgggaaacatcgtccttattgggagcggggctcgcttcaggggcttggcagccagaaagcaatatagcagcaaagaggccgaaaccgcttaatgttcgcaatgatcggcgaagaaaagggtgtatcctcattgactgttcctccatcatcatttgttgactgtcccatattctaacacgaaagagagactagaacgagaaaatcatgtaatcgccaactcttggtattcaggatgtttatcaaactcggctttcgcaaacgggcaaatgggatcgatttttttgccttgttttttcatatcggctacgaaagaagcgacgagttttgcgccaatgcctgatccacgactatcaggatccacaaaggtatggtcaatgaccatatgggtgtcttcttcaaaaaaggttaattcgcccactgtttttcccgcttctgtcttaaacgagtaacgtttaggttgtttgtcaatattcatgctatctcctcgttttatggcgtttaatcaattgttaaatgagtgcgcaactcattgccaatgcgttctacttcttcctgtggcaagaccgcgaaccaaaggccgtcgactgtctcctcacggtaagccacatcgagctgcttaatcgactgtgcggcagggcgataagcagaaacataatggagcatttctgtaagtgtcaaatccgtttcgatggcatcgctaagggattgtagaaacgcagggatgttcgccaagttgccaacttgcaaacctttagtgatggcgctttccatgacgtcgcgttgacggcttgtccgacctgcatccccggcagggtcctctttacgcatccgtacataagcaagggctttttcgccattcagtgagagtgttccttttgggaaatcgtatccatcgatcgagaagcttttttcattaaccacggaaacaccgccaagggtattaatgacatcaacaaagccgtccatatcaacggcaatataatggtcgataggaatatgaagcagctcctcaaccgtttgcaccattaaatcaggccctccataagcatgggcatggttcagcttatcggccatgctacggccagcaatctggactttcgtatcccgtgggatgcttacaagcttaaccgattgtgctttggcattgaccgttgctaccattagtgcatctgaacggccatagccggatccagcggttttatcaatgccggcaattagtaaggcgagtggttcgcctggctctgcggtggcctcccgcttttcagaaatgcccccgttgtcgattctgctatgaagaggggtatgcatgttgttgttggcatgtaagacagcttcatatatggaatagccaaagccaacaaacaaaagcaagccgaccgccaaacaagcaatgactccttttgtgtacgagttcatcaaaaaacgatcctttccaaacgtctttcttaccatacccgctttcagaaataagcaagctgcaaatgtgtatccttagtctcaacggaagtcacggggtgtatacgggcaattgaaaacacgtatgaaaagcatagctttttgtgtgggcatttacgtttagcaacaggctgctaggcatatcggtcaatatcgataatagcttgctctgttttgttattcaagctattttcggttgaggcggtttggttcaatctggaaatggagccttccctatgaaaggctccatttccatttaacaacgattgacctttatttacttgctttcaagctgtgctttgcggtggacttgccaacgccaagagtcttcacacatttctataagcgtccgctttgcttcccactgaagttcagttcttgctttcgtgggatcggcatagctgacaggggcatcacctggacgacgggggccgatttttttcggaatcgtgatgccagtcgctttttcaaaggcgtcaaccacttcaagaacgctgtagccagtgcctgttcccaagttatatgcttgcacacctgtatatgtttcgatttttttgagcgcttgcaagtggcccaaagcaaggtcaacaacatggatgtagtcgcggatgcatgtcccatcttttgtcgggtaatcatcgccaaaaacagacagttgttcacgcacgccggcagcaacctgggtaatataaggcatcaaattatttgggatcccgcttggctcttcgccaatcaggccgcttttatgggcgccgattgggttaaaatagcgtagcagtgaaatgcgccagttgttattagaagtcgctaaatcacgtagcatgtcctcaataatgattttggtattgccgtaagggttgacggcttttaacggcgcgttttcttcaattggaacttgttcaggcaatccgtacacggttgctgatgaactgaaaacgagtttgtatacaccatatttttccatcgttttgcataattgaatcgtgctgccgatgttcgtttcataataatgaagcggtttttcgaccgattcgccgacagcttttaaaccggcaaaatggatcaccgcttcaatgttgttttcagcgaaaaccgtttctaaacgagaggaatcaagcaaattaatgtcataagtcttcacttttttgctagtaatttcttcaatgcggttaaccgtatcaggtccgctgttggaaaaattatcaactatgataacgtcatagccttctgttaaaagttcaacgcaagtgtggctgccaatgtagccggcaccgcctgtaacgagaatggacatagtatccctccacggtatacaaagtaagtgttattcactctagtataccagaaatgcaaaaaacaaaatatagaagaaagaacgaacaatcttgaggaaaaagcatgataaaataaaagaaaaatcccgggggctgaatcgatcaatggagcaagaaaaatcatggcgcgataggattgactatacgctcttgtttctcgtgtttgtgttaggttgtctgagtatcatggccatttacgcaggcacaaccacccagtttttcagtgctgaagactatgaaaagtatcgccatgtgtttgccctttcgcaagcaaaatggtttttaatcggattcgtattaatggttgtcgtaatgctagtagactatgaatatttaaaacgcttgacgattcctatttttgcttttggcatgatcttgttgctatgggtgcaattttttggggttgaaaataaaggcgccacgcgttggattggcattaatggcacgccgatttaccagccttcagaagtgatgaaaatcattcttgtcctcacgcttgcccatttaatcgtcgtgctgaatcaacgatattccgaaaaagggctcaaagccgatttaaaaaagctcggctggcttgctgcttttgggatcccgcctttctatcttgtcttaaagcagccagacttgggaagcgcacttgtccttgctgtcatcattgccactgccattcttatggccaatgtttcctataaagtactagccagtttggccgcacttgcaggggcaggaatcgcttttctttattatttgcttttaaaccatattgaactgattacaaaatatgtgttagaagaacaccagcttgtgcggattctcgggtggctatacccagaggagtatgcatcaggttatgcaatgcaaacattaaatgcgacacgaggcattggctccggccaattgacgggaagcggcttcttaaatagtgtccaagccgctaatgcttccacgcctgaactccataccgattttatttttgccgttattggggaggaatttggctttctcggttcgactgttgtcatttgcgtctattttctacttatttatcgcctgattatgctcgctcactcatgcaatgacttatacggaacatcaatcattgcgggcattgctggcatgttgacgtttcaaattttccaaaatattgccatgaccattgggctgatgcctgtcactggcatagcgttgcctttccttagctatggaggcagtgcgctcatgacgaatatggttgccattggcattgttctcaatattggcatgaggcaaaaaacgtatatgttcaagtcaaccagtgaagtcgtcgactcagacaaagggacgcttatcccgatgaaaggaaaacgattcaagctgcctctctaggttcgcccgtcccctataaagcaacaaggcttcctcgcgtttgtaaggggaagccttgcttagtattgagggcgccaaacgaacctgaagtttcatgaggaaattaagttgattcatgctcttctgtttgaacgacctgatgcaaatagagttcttttcgcttgctgaatcaatacaatgcgccaataagaagaatcgccgcggctaacgcgaatataaaacgggcgccaaataaatcggtcaaaaaaccaaaaagaagagttgaaagaccaaatgaggcgaagccggcagcttcctgggcagaatatactcgatccagctctttttcggggacaattgatgcatggcgacgatgtacaagaaggccgcttcttattttgagacgttttattgcagttcttctgttattatacttgaaaagagcattataggcagatgaaatgggttctttaaaatgatgttgctttatgaatgtcctgcatgttcatgaaagaatagacgaaggcttggttgtcttctctggtattgtctcttacatttaaatcaggcctttcatatcgatctgaatcaaggacttgattatttgcttcgatctattagttgaaacgaaacgtttaaggaaatatacagaagggagaaactaatgaacgaacgactttttacttattgatcataaagtaaaagaatagagttttcattttcggaaaatgaatgtagtaaaaatccttttgtacaaggatgggtgttaaaaatggatagtgctgaatgtttagggtgtaaattagctaataatatagagtttgtttataaggtttatgaaaatgatttcgtannnnnnnnnnnnnnnnnnnnnnnnnnnnnnnnnnnnnnnnnnnnnnnnnnnnnnnnnnnnnnnnnnnnnnnnnnnnnnnnnnnnnnnnnnnnnnnnnnnngtttataaggtttatgaaaatgatttcgtatcctgtatattggatcacgatccatttaataaaggacatgtactaatattgccaaaagaacactttgaagaattggatcagttaaataggaaaactgcaaatataataattgaaacttctcagattatatccaaggctataaaagcactatataagccagacggaattacaatatgccaaaatggaggtgtttttagtgaactaactcattttcatatgcatgttgtacctaggtatatcaatcaatcgtttgctcctttttattcagaagaaccattccagaacagcaaactgaagaatgagttgtttgatacgcataaagagctagaagataaaatcaaccggttaattatgtaagaaaaacaagcgcatagaaatttaacaactatagatgtagattttccttttaatacgttgaatgaacctttttaaacaaaaagaggaatagagatctccttatttttatttaagaaataagaaagtcacttctttagtaatataaaaaagttccatctgaattgcttaacaaagaaattaaaaagagaggagaggcgacgatggatcattccatgtatttagccaaaacgattcacctagcagctgaaagcattcaaagcgggggtggtccttttgcggcgatcattgtggacccaaatggagcgattattggccaaggcactaactctgtgacgaatgacaatgacccgacggcacatgcagaagtggtggcaattcgagatgcgtgcaacacaattaacgattttcagcttgaaggatgtacgctttacacaagttgtgagccatgcccgatgtgtttgggtgcgatttattgggctcggccaaaggcggtctattttgcagcaacgcaagaggacgcagcagcagtcggatttgacgatgcgtttatttacagagaaattgaaaaaccttataaggagcggacaattccgttttatgcgtatgagataaacgagaaaaagcgcccgttccaaatgtgggaagctctggctacaaaaaccgagtattaacttgccacatcagttgtcaggcaaaacgcttgtcagttgaggcaaacaaataaaactaaaggctaatgccgccaattaggcggtttttttgtactctcatcagaatcttcaattcattaatagacgatttccacttgaaatcccctttgagctaaaaagagcacaagggaaatcccttttttcaaaaaggatgcacttacgggcgaaaagaatgagagaaaaaaatgcgctcaaatgagattacatttgagcgcatctggccattactgatcccagattgtatcaagtttatctgcgtaaaaacgaatcgctttttcatagctctttaaggcagtgtcatttgtcgtatccgcaatggtatacaaaagctgttccattgcttcactgtgcttgctgttgttgtataaagccattgctaaaaagacttgcagtggtttactgttcggaaagagcgagcagcctttgcttaacgttttttcggccttgccatactcgccaagtacacggtatgtgctgccgaggcctaaaagggcgccttctaaatcatcgcctgataaccctaaggcaatcgcctgttcataatgagggacagcttggcgctctttccctagccgatccaggctagatgcatagtagtagtgggaaagagggtcattgggctgctcggcaagcaaagcggcaaatgtttcttgcgaagcttccagcttgccagctgcttgtaaagagaatgctttttttgctaatggatgcattccatcccctccttctataaaggaatcgacttattcgagtcccaaatgtgacagcatttcatttcgcacgcgggctttttcttcgtcgctgacaatggcgtaccaaatgccgtcaatcgtttcccctgtataggaaacttcgatttgttcggttgaaccgagagcagggcgatattcagactggtagtcccacatgacatctaatgataaatctgtccggacagtggtgccgagcacatctagaatctcgccgacttttgtaatcgagccgagagaggcggactcttgcatgagggcgtcaataatgtctcgttgtcggtttgctcgtccggcatcaccgcgaggatcgtcatagcgcatacgtgtgtacttaagcgcctcttccccgtttaactcaatcgttccttctgggaaatgagaaccatccatctcaaactcaaaatcattgtaaaccgtgatgccaccaaaagcatcaattaaacgttcaaatccagccatattgatactagcgtaatggtcaattggtatgccatacgcttcttcaatcgaatcaatcagcatttgtgcgccgccatatgcatgggcatggttgattttctccaccgtgccgcggccaacaatctctgctcgggtatcacgaggaatgctaagcattttcgttgtcccttctgccgggtttaacgttagtaccataatcgagtcggctcggccaacaacttcgtcttcgcggccttccgttaaatccaccccagtgagaagaatcgacattggttctccgacttgaaggctagcggggcgaagcggagaagcgccttcgcggtttggaagagggtcatacatttcattggctgtatggcgaatgtcgttgtacaaatagataccgtaaccaatcacgctcagaaacaggagcccgaaaagaagggcaatgacttttaaaacggttttctttttcataataagaataacgcctttctaattgaagatatggaattaggcaactactttcttaataggataattaatttactaccattccacaagcctatctttttgtatttttaagtgaaaaataaaataaatagaatcgggttatgggtcacggtgctaaagacctactaattgacggaaaagtaagataacggaggactaaagtttctttgagataagctagatttcagggtaatttctttgcaaattatgatataattcgtaaagagtcagggaagtgacgtctaggaggtatataaacaaatggaagaaaccataagtttgaaagaaatctttcaaacattgaaacaaagatggcggctccttgtggccattccgttctttgctatgcttgtgagcgcgattattagctcgtttgtactgacgcctatgtacgaacggtctacacagcttcttgtgaaccaggccgttccagaagggcaactaaaccagcaagtcgtccgtaacaatcttgaactaatcgatacatatagcgagattattaaaagtccaagaattttaaatgaagtcattgaggctgaagggcttgatatgacttacggcgatttagaagcggccgtttctgttggcagccagagcaactcacaggtggtgacgattacggtcgagtcagaaagtccagctgatgccacacttttgacgaatagcattgcgactgtatttcaagagcaaattcccgatattatgagcatcgacaatgtgagcattctgtcggaagcagaaataggagaagacccaacgccggtcagcccaaaaccgttgttaaatattgcgattgcttttgttgtcgggcttatggcagcagtcggtttggccttcttgcttgaatacttggatacaacaataaaaacagaaaaagacatcgaaaacatcattgatttgcctgtgcttggcgcggtctccaatatggacagcgttgatgcggctgcaaaaaagacgtcttagattttaggaagcaggtgacttatggcacgtctaacacgcgcgaagaaaaagccagtccagaaaaaacggcaactgattgccgatgtaaatcgacgttcacctattactgaacaataccgtacgatccggacgaacattgaatattcggcagttgacacggaaattaaatcgctgcttgtcacatctgccggccctggggaagggaagtcaaccaccgcatcgaacttagccgttgtcatcgcccaaaatgggcaaacggttttgcttattgatgcagatatgagaaagccgacggctcattatacatttgggctcatgaacaaccgtgggttgacgaatgtgctgacacgccaacaaaagcaggacgatgtgattcaggaaacaaacgtcgagaatgtgtccctgttgacttgcggcccgatcccacctaacccggcagaattgttaaactccaaaatgatggagcttgtattgcaagaagcaagagaaaaatttgatatggttattttggacacgcctcctgtcatggctgttgccgatgcgcaaatccttgccaacaaagtcgatggtaccatcattgttacatcaagcggcaagacggacagggagcagttgcaaaaaacgaaagaaaacctcgtcaaggcgaatgctcatttgcttggcgttgtgttaaacaataaacccattgatgatacaacctattattattacaaataacgaaaaaatcgcgattgcttttgccagttgagccagctagcatgatgaaaggaggggaagcaaatgatcgatatccattgccatattctccctggtctagacgatggggcgcaaacaagcgaagatagcttggcgatggctcgcgaagctgtaaaagaagggatttctgaaatcattgccaccccccatcaccaacacccgtcttttcaaaatgatgtttcttccgtccgtaaagcagtagatgccttaaacaatgatttagaggctgcaggcatagagttaatcattcggcctgggcaagaactccgcctttatggcgaaatgactcagggactggctagcgggagcggtcttgcactggccgacagcaaatatgtactgattgaattcccgagttcagaagtgccggcttatgcggcaaggctgctttatgaaattggcagtgaagggtatattcctgtgatcgcccatccagaacggaataaagtattcaaggaagatccagataagctctatgaactggtgaaaaatggcgctcttacccagcttacgtcttccagcgtgacaggctactttggcaaggatattgctacctttagcagagagcttgtcgaagccaaccttgtccacgtgctagcttcagatgcccacaatttagtgaatcgcacattccgaatgcaggaagcgttccacgtattggaggaacactacggccgagaccttgtttacagctatcaagaaaatgcccggcttattgcggaagataagcatgtgtaccttgagccgccagaacgggttgtcaaaaaacgaaaaaaatggctaggtttgttttaagaaagaagttgcttgaccaatagaagcgcttgccagacgagggaagatgttaataaatcgaagggacaggagcaatgatattcttgtccaggaaatttcaaagcatctgagcgcggtaaagggaaatgtttatctagaagctgcctatagtggcagcttttttatgcataaaaaagccgccggaatgtccgacggcaggtgggggatacgtgttaattagtatatccactaacgaaacgtctatacatgggaatcgctatttttgccatttttagatgattccttgataacgcaagacgatttcagcgataatcgctgagccaattagtgtaccaaaaagaacgagcaaacaaacgaccattgctttccaaccgatcgccgcaaagtcagcccatgaacggcctatggcaataccggcataagcgagtataggcgtggcaatagagagcaattggatgtgggctgtgagctcaatgacgactgggccccacggcgtctctggtaaagacaatataatgccgatgacaatgatataaacgacacttggaatagggaaaggcagcaactttccaagagcttgcccaacacaggcaatcacgattagaagaagcatgccaaaggcagcctcaccagagaatgcttggtagccaagccaattgccaataaacgcaacaagaccaacaataaagaagagcataaacgattcttggatggacttcatctatggtctgtctcctttccaacgcctaaacagcgcatacaacttttctgttaacggcaaggcaatgaagacgctcacaaataaaccagtgccataggtgagtaggttgcttgcgccagcgaaagcgataatttgcgtctcaaactctggataagcagcaatgagcgccccgcttgctgctgccatcatactgccgctgccaactccagcagccatcgccaacgataaagggtggagtggggtgaaagtagctaaaaaaccagaaataagtccataaaacaaagcgccaaaaacagtgccaaatacgtaaatcgttgtaacccctttgccttctggagagtcaaagccgaacttgtcataaataatccctaaattgggctctcgtccgatagagtgggtcatgccaatgctttcccgcttcattcctagcagcaaaacggcaacgggcagtgctaagaaaatggtgccgaaattgccgatttcttgtaaaagcaaggcgggaccagcagcaatcacatttttcaagtctggccctatagtgacgccgattttggcgatcagtagcgctacactgagcgtaatgattggctctgcatgtttggactgtgtttctttcacgagtggcgtgaaatacaaggctaaaccgaatacaagggcaaacagcatcggcaagagcatgatcattcctgctcctaagcgaatttcaatcacgccaatcatttcagcaacgacaacaatgcctaagacgagtaagtgaagtcgccagtcggtgaggaaacgtttttgtttattcatagttcccgcctttcttatgaatagggaaatcgatggtgcagaatcatttccaggtaattagtaaacagcagtggcgtctttatcgcctttgccttgatggagcgctgagcggtagagctggttgacagttccagcagcatgctggggtttgcgcgaatcttgcgacaatgccatgtagagttcaagatctttagccatatgctttaagtagaacaacacattgtcgtatgagccggaaattaaattttccccaaaaacgtcaaggacgcgattatggccagaactttgttggatgatttgggcaagaagccgtctagatacgccatggtcgctagcaaccgccattgtttcgctcagcagcgtcgtaatcccggcaacaagcatgttgttgcacagtttgaccgtttgcccggccccagaatcgcccacatacagaatggtatcgccgagtatgtcaagtagcggttttacactgaagtaagcttgtttgtcgccgccaaccatgattgttagcgttccggcatcagctccagcaggccccccgctgacagggcagtctaggtaataaattcctttggcagcagcggctttttccatcgctaatgtcgtttgcacatctgtcgtgctcagatctaataaaaagccacccgtttgtaaatgacaaagcacgccttctttgcctgcaacggtgtcggcaactatgttcggtgaagggagagatagcaagacatactttgccttttttgctacagcagcgctgttttccacaaagcatgctccttgtttttccaatggttctcgccatttggacatgtcgtcataaatataaacggtatagccggcgctcaaaagggacgtagccatcccttttcccatggcgccacagccaataagaccaactgttttcatcactacctcctaaggtttaagatagactgcttttgtatcaacccaaaagtcaagggcagtgcttccttgttccctcggcccaatactcgaatttttcttgccgccaaaaggcaattggttttcgtagtgattggaagggatgttaatatgagtcactcctgtttcaactcggcggacaaattcatgggctttttgcaaattggttgtataaatggccgaagagaggccaaaatctgtctgattggcgacggcgatcgcttcatcaaaagaatcgacttccattatcgccacgacaggagcgaacacttcctcttgggcaatggtcatctctggcgtaacgccgcttagcacggtcggcgcgacgaagtagcctttgtcttttccttcgccgaaaagacgcttgcctccgcattctagcttcgctccttctttgacagcaatgtccacataatggaggtacttttgaagctgcgcctcattggcaacagggccattttctacattttcattaaacccgtcgccaacacgaatggcagttgcttgttcgacgagtttagatgtaaccgttttggcgatgtttttaggcacgatgacgcgagaggttcctgtgcagctttgcccgttgttcagcaagccgcttatgacgattccagaaacagctttatccaagtcggcatcctctaaaataacggtcgcgttttttccgcccatctccgcctgcatttttccacctcggtttgtaacggatcggcctaatcgcaaaccgacatcggaagaaccagtaaacgaaatcgcttttaatgttcgattttcgcctaattcttgtccaactttgtcgccgtcgccagtgacaagattcaaaacgccttttggtgttccggcctcgataaacaactcaacgagcctcgcggcaatttggacagtatcattatggggcttgtaaacaactgtatttcctgcaattaaagcaggggcaattttataaatcccgatgcctaaagggaaattaaaaggggtaatgacgccaacaggaccaagtggctctttgatcgtataagcaaatgtctcgggattgcctgcaggcacagtctctcctgccagcctattggcggcgccgctaaaatgtttgagtgcttgaatggaggcatctacttcttttcgagcggcggccatcgtttttccaacctcctttgtgatgattgccgccagcttctccttttctgctgctaataaaggcattaattgataaaggacatctgcccgttcaatcgcgcttttatttttccagttaggaaaagcagcagcggcgctcttaatggcgagccgcgcatcttctgctgtagatgcttgataggcaccaaggatttcctcgtagttggcagggttgcggccataaaagacatttcctgaaatagacggtttccattcgccgtcaatgtagtttaaatatgtttgcaccatatgtcgatcacctcaacttgtgtttgcttgtctatgattataatattctgacgaaacaaacgggatatggtgggctacatgttttagggcgtttctgtgtggccgtccacatacaactcataagcaatcatgagttgtagccactgtctttcattttgaaaggatatgtctagtacttgctcgatccgtttcactcgttgatagagcgtgttgacgtggatgtgcaattgtttagccgtttgttgccgggcacctcgcccgttttcgattaatgccgcaagagtggcgatgtaatcaggttctaggtcgaggagtggctgtaaatagtcaattacaaaatcgcgcttcgtctgttcgtctaaagaaggccaaagcctgcggcagccaagggtttgataacgaacaagaggggcgtcgcttttcatttcagcagcaagcaccgcttcccggtaagacgaagcgacgtcggcaatcatccttgggcggcttaggccgacaactagatgatagtggcgctgcaaataagtcgcaagttgatcaatataggcacaagaagaagcaaggacgacataacgcccttcgtaaacagaaaaatgcccatttgggaagtaagcttggactgttgtttcaatttggcgagtaagcgcaatgttgtcgctaacaccgcctgcaagcacgaaacaataaataggggcgcgggacaaggattctacagaacgatagtctccattcaataggtcttggaacgcgcaattgcgcctgtgaagcccttgttcataatcgtcatattgtttttctagctcgctagcaagcattaacgcagcaaactcaaggatgttccggtcgaccactgataaagtcgccaatggctgccgggggcgaaggtaaccgaggcgttttcgcttgcgtatgatcggaatcgcttcgtcttccttcacactcgcttcaatcgtgcaaggtgtgtgcacaagctgttccaaccgggtaaggacatgctccagccccccgtcatgcaacgattgtgcaagtgtttcttttgcatcgctataggcaagtgcctgatgcaagcggacgttctcaatcgccagtgctgcctggtgggcgagtccgagagcaatggcaacgtcttttttatgaaatgggatgctgcttgaatagcgatttaatgtaaatgtgcctagacaacggccattggacaggaacggcacattaatggagctcgtaacatcgagtttgtatgtgccttcgcgaaaccatttccagttttctggtgagatgttggccatttttcgcttaacatcatgcttgccgaggcaaaggtacggttttttgctgagaaacactttgcccgtcaacgattcaccgggtttaaaagcgagctgccgcaaactttgtacagagacgcctgtgcctgcgccaagccgaagcaccttttggttctcgtcgtataaatagacgatcgccatatccacatgagggataaaggcatcaacggtatcaagcaataaacgaagaatgctctgctcatcgcttgcttcggctaccaattgattaaattgaacgaacaccgttatgtcgtttgcctgtccaactttcattttcacgacctccattcatagaaaaaatagatgattctaattttacttgattcactctccttttagtagagtcgtcgtgtatcttcctatcgtaatagtaagtgttgttcgttgttgggctttcgttcttcttttttcgcgatgttgggaaaacggccaacatgatatacaattttaaaatgattggatataatcaggataagttaccaattacttccgaaaggttggtgcctatggcttcttctatttcacctgaaaaattgggcgcaaaaattgttgaatggtacagctgtatcgtctctcgtgaggttgaacaagcagaagaatataaacaggaaattagccaattggtcaatcagctagaaagatccgacgaaaaagtgttgtcctattactcgcttgttttgtttcgccatcagctacttacggaagatgtgcaacaaaaaagggttgaaccaacgagcctccaggcaatcaatgtagagaatacggtttatgatggcttgttggcgtttctatattattttatgagtgggcaatatgagttttatgaagggcggtatcaatcagcacttcgcctatataagatcgctgaacagaaaattgaccacgttcacgatcaatcagagaaagccgaattttatttccgtttaggagaaagttattttcgcattgaccaatatacatttgctgtttcttatcttgagcaggcaattgatttgtttgaggaacaacaattttatttggaacggattttaaattgcaagttgcttttagccgctattaaaacagaattaaatttatttgacgaggctgaacaagaataccaatcggcacttgctgacgcaacgccttatccaacgacgcacgctcttcttttaagggcactagggctgaatcgagtccgccaaagaaagttacatgaagcggaaatgtattttgctgaagcgctaacgattggtgatcattctaaaagtgtagaaggacttaaaacaaaggctaacttggccaatgttcgcttgcgccagaatgccaacaatgcagaagcaattcgtttgttacaagaagcaaaagcaggagcgacagccattcatctcgaagaatgtatggtacgctgtgccatcacggaagcattgtacataaacgaagggagggacgagcgacttacaagtgagttgcaacgactgttggagcgagaattttacactgagtattcagaactagcagaagagattgctgaatactataaacaacaatcgttgcttgaaaaggccttttattacatgaaagaagcgcttcattaccgtactaatatgaaaatgataggagttgaacagcaatgaaacgaatattccgtttggtattgcttgtctgctttatttttgttccgtttgtggatggagccaacgcagaaacatttactccgattgaaccacaagaaaaaccaggcacggcgacataacggagaaattcctttaaccgtacgaatatgaaaatcttagggtcaggagctgaacaacaatgaaacgaatgatcggcatgatcgtaatcgtctgctttatttttgttccgtttgtggatggagtcaaagcagaaacgcctaccccaatagaaacacaaggtaagccaggcacggcgacataacggagaaatttctttctaaaaaacactaatgcctaagcgttagtgtcagatcgtagacaaaacgcctttgagaaaatgattctcaaaggcgttttgttgatgataaagagatgggtggatattggagactttggagttggaggaagattcctcctccaactccaggtggctaattttttcaagttcatcgcaccaaaaacaagcatcgcctgcattgcatttttttccaaccctttgaggttggtccaacgcagaccatgcttctgtttcagatcggcaaagacacgctcaatcgtttctttccgcttggcgtagatgtctcggttccgctccgtatgcctcagatgttctgcttcatccatccgatagttaaaaaacttctttacctaaaaacgccattcaaaccgctacagtagaccgcggaaaagagtttgcctgttatgcatccatcgaggaaacaaacaatctttccttttattttgcagatccttattcttcatggcaagaggcagtaacgagaatggaaatggactcctgcgagagttctatcctaagggtacggatcttgcaaaggtggatccatttgaatgagcaaagtccttagctctcataaacgaacaacctaggaaatgtttacaatggcgaacagcccacgagacatttacccatgaactgttgcacttgaattgacaatttatcgtatgaaaaggcgctcattgtcatttccgctttttctggagtttgcctaatcggctttggcgtttattttggctaccatggcatcgctttgcttctgggataataaggaaaaaggaagcatcatcaaggtgcattcggatagaatgcgccaaaggtggttttgagatttgaaatttaaaaaaattacttagcttgttcatcgtttctgtagaaaatatgaggaatgcagcgctttttgtctggaaggagaaaaatgattgactttttctagacgatttcgaacagttgttttaaaataaaatggaatgaatagccatttttttagacggaaggatgaaaccaccaggggggaggatggcttatgtccaatcagatcgaaatagccaagctccactatgaaattagccaaatgcgggcgcaacttttccagacagaagcgcaattggagcgattgcgggcggccaaacaagcgcttgtttccgaacaagcgactcttcacgaccataaaaaatgggggagcgaaccagagctagaccatgatgcgtggcgcggccaagccgaatcgacgcacgatgacattcgccgccatatgcaactggcttacacgaacgtacaagacgaaacggaacaactgatgcgcgcgattgaaatggaaacgaggcggctccaaaccacgattgcctcttgccaaatcgtgatcgacacaaaacaacaatcgctccaaacattaaaagcggcgaaataggaaaggaggaaagaaccgatgcctgaaatcaaaatcgacgaaggctccgtgctcagcgctttaagcgaaaccggggaacaagccagcttttccgtttcggtccgcgagcctgcgctccatacgtcgtcgatggcctttctccattcattgctagaagtggaaagcgggtatgccgaccaattcaatcgctatttggacgtcgtgaaaaatgtacaagcagaaacgaaagaacttgttcaaacatacggagttgtggacaagatgctggcaagccgccgataatagagaaaggaacagacggatgaacacacttgacgtacaagaagtactcgatgcacttgacgaaatcgtggaacgaaagcttcacgatcaagcccagctcgaacgcttgcaggccagcatccagaagatcatccaccttgattccctgcaaggcgaagggggcgaagcaatcaaagaccattttgcgacgctccatctccctgtattggcggcgttccagcttttcatcggccaatacatcgaacaattaaagcaaatccgctcgaatctgctcaactttgaaagcagctcagccctgatccgggaagaatttctcgccgacgtcaaaaacggcctggaccgagtcgagcgctatgcgatcgaagatgcgacagcgattgagtcgattcgcgcttccatcgccgacctgttgccactgccaccgttctcaatggaaccggtccttcgctacgcccaacaaggcaaagaccatgtccgtgtaacggcagaaagacttggcaacctggatgaagccaacgaagcagtgctctcaagcgcaaaaagcaccttgcaagaactaacgactgtcgtcagccaagtagccgactggtccagtggcggtgtgatcccttccccagaaacgcaggcggagatcgatgccaatatggaaaagctgtaccaaaatgtggtgacacaagcgctccaaatggcaccattagaccgaagccatgtcgaaggccgcgaaggggatttgtaccaagacgtgttgccgctcgaatttctgtatacaggcgcctacgcccctctatacagcgggctgaaggcggccaactggtattacttgaaccatttccctgtcagtgcgatcctaagcaatgaacaggcgctgcaagcgtgccgagcgccagcgatgggagcaacccaagccgtttccccgtcgtacttcccgttgtttgcgcgcctatcgaccctgcccgttgaagcgacggtctcaccggacgtgctgacacaacagctccaacaactggttccgatccaataccaatggtaccaagctcagcttcgtaaccaagcgattcatacggacacgtcgcaagtggtcgccataccagaatatatgtttacggatcaagaagtcgcagctatcaacacgtacctcgagaaccaccctccgaacgaggagaggttgaatacaaatcccattgttactggagtggtcgactttttatttggtgactacatcacgctggtcgacccagaagcttcattgggggagaaagccttggcaacgacgtttatcttagtgaagccagcgaaagtgggaggagtcatctacgacttgtcgaaagcgaggaaggtgaagactggtaatagaactagccaggttaacaaagttaatataccggaaaatagcattaaacattcaaatataggtgactttacaacaaatcctagaacaggagctatttcaagaatgaagggtggaggacacggacaaagtaatattgagtttttagaaaaaaataatgtagattataatataactcaagtatatgagaacggtgttagagtggggaatgtacctggacataaggtgaaagcaaaaagaacaggttctaatcagtcatggtttccagaaaactggacggagtctgatattacagcagcaggtgctaaggttgctgaatcacctaaatttgccaatgctgaaaatggagtggctatttttggagagtataaaggagttagggttggtgttataaaaactaatggagagatagggactatttttccagatgctactaaacaaccatagatgtagagtggagggtaaaaatggataatatgaagattgaaaataaaatggaagttatcttagataaaagaaaaaaaataaatttaaatgatgactatgggatacaaaaaagttggaatgaaataatagaagttctcacagaaaatgaggaaaatactataaggtatttagaaaattgtagtaaagaagatttatactggataagtgaagtttttgaggatatagcagaaattatacaaagtaaagaactaattaattgtttaagaagattagataaaaaatttccagaattagagatgacaaatgatattgatatagcagcaagttatacagaaaatccataggaaaaaggaatatttgtgtccttatataaagtgaggtggagtaatttgaatccacaaaaaatactaaatgaaattgaaaaactgcattattgggatgctagagttttgcaaatggaagcaagtttttttggagatgagattagaattgtatttgaagacacagagtttaatgtaatcctactatttactggatgttcaaaattctcgtttgcaacaagtgtcgatgataggttgaaacccttaaaagagttaacaaaaactcaaattccgtattttattcaggatattgagattacagatgtgcagattgatggaaaagacagattaaaatgtaacattttaatgccccctttgaatgtagaagttgtttgtaatactatactaattgataaagaataataaaagaaactttgattgatacgagtgaaccgtcccccggaaaatggacactttaaaaaagtccgtttttcgggtctttgtgttcttttacaacgaacccgttataatcaaatcagaagaacagggaatgtaaaaatgagtaacgagtagttattgttcttgatcaaaaacagttagaatttaaaccatttccctgtcagtgccatcataagcaatgaacaggccctgcaagcgtgcagagcgccatcgatgggagcaacccatgccgttaccccggcatatttcccgttatttgcgcgcctatcgactttgcccgcaaacgcgaccgtctcaccggcaatcctgacacggcaactgaaacagctggtgccgatccaataccaatggtaccaagcccagctccgtacccaagcgattcaaacggccgtttcggaagtagccgccacagggcgttctgttttaaccgaggaagaagtcgcagccatgcaagcgtaccttgaaaacaacccttccggcgacggtcccctcatagccgaagttgacgaggaagtatacaaagacgggcgttatcccgggccgacgaaggatgcccgtgttggcgccgacgggatcgcgtatagaaacgacatcggtcccattattgctgcagcagccgactttttcttcggtgacttcctcacgctcgccgacccagaagcttcgctcggggagaaggccctggcaacgacgtttattttagtgaagccagcgaaagtggccgaactcggatatgacttgtcgaaggtgaggaaggtggagactggggggaagggtacagataaaactagaccatcttggagacagtctgaaattgatgtaggaaaagaatatcctgggtatcgtgaccaagtatcatataagcaaggtaatgaagtaagtcatggcactaaaaatagttcaagaccagatttctatatcaaaggtcatagcatagaagttaagaattataaagtgactacatcttctggtagaagtaacttaataagaaatgtgtcaaagcaaataaataagcggataagtgatttacctgaacaaacaaagcaatctgttattattgatgttaggggtcaaaatgtctcaagggatgttttaagagacattaaacaaaaaattaatgaaagaacaaatgatgtagcagaaataatttttaaaatggattagaggtgaaagttagatggcggtaggaatattagtagattgtttttattacgaattaggtcatagcgattttgtacattcatttttttcaacaatctcctatcatttagaaaaagaaggatggggtacaaaatatcctttaattatgaatgagttgtataatgacaaactaaactggaatgatgtttctgttgtaaaagctaatttaattgaaattgaaaaggaattatcaaaacacacgccggaacaagttatatgggatattgatgacttatcacaaaaaccaccgtggggggataaaataagtccaaaagtaactagtctagcgaattattttgcaacagctgatgggaaaacattttttgaagtactacgtacagcaattgacgtagcagaagaagataaatgtgatttaaaaattcacaaactataatttttcttaaccatgggatactatcccatggtttttttacgatacggagtgccgaataaaacaatttttattcagataatagacttaaaccttgtaagccctacacgatgttctaaccaattctttagtacgaattcgacataactaataaatggataaataccttaagggtgattaccctccttagggtattttttatgggtggagtgccgagctaactgacccagaagcttcgaaagccttggcaacgacgtttatcttagtgaagccagcgaaagtggccgaactaggatatgacttgtcgaaagcgaggaaggtgaagactggggctgtcccatataaacagggcggtggtagtaatccaaatgattttgttaatcctcatgctgaaaaacatatgtatgactctaatataacatcgaaaccgaacaggactcagtatagagagaatgtagatgtcggtaagttaagacaagaaacaataaataatccggataagtgcctatactaattggccgaaccctaataatcctaatacccagaggataacaaagtactataaggagtttaatggtaatattagtacaccagatactccaactggaagtcacatggtgtttgataatttagataattacaatagaagttcacattttccctatgtaccaagaaaataatatttaaggccctatgtaccaagaaaataatatttaaggaaagtgatagttttggaaattacgttatatcattcttatttacctgaaagccatgagtttcatgtacctttagaagagattttcagttatggaattaaatacaatacaaaatccaacaatcgttatagcaatggtgggacggtcaagttagaaattacagaaaaacttagacctagggaaacacccgattggattgattttagaaaagcagtaggagtcgatctgacaaatcggttttctaaatcattttgttttccacttttcactcataaagttcttgtgtttaatggtgaattatcaatgaatatctatgaccaatcattttatgaggatttaaaagaaacagacgaggaagcgttaaatttcaatactggcagaagtattgagtactggataaaggagtactgggaaagcatggttgcgttggaacagtattttcaaaagaaaccatatccaaaaccagaaattttgatttttgaagatgtgcttaatcaaatcataagagtatgtgaatagattggctatatgcttagtaaaactagaccttgactggcttaagcctttcaaggtttctttatttgatgaaggtgctacctagtgccgaatagtttatttttatgcaggagtatgagtaatccatgtaagtaagacttaaattacgtttttacgaatcatacagtacgtataacttttaaaatgtatccccggttttcagataacttaataacatcagcaataggtgattaaaactaaaccgttattagtacatttagaaaaataactttagttactataagatacaagcttcgtatggtttttaaacggatggggcgtgtctaaaggttgattgttaaagattaacatactatcgtatacacagagcgaccaacgatgcccgtgctggcgtctatgggatcgcgtataagaataacattagccttatttgatccagcagccgactttttcttcggtgacttcatcacgctcgccgaccagaagcttcgctcggggagaaagccttagcaacgacgttcattttactgaagccagcgaaagtggctgaactcggatatgacttgtcgaaggtgaggaaggtggagactgggggaaaggggaattctaaactaagcccatcaaattacccaaatccagacccgcctatgtctataccgcctgtaagatatgagccaaagaccatagaagaagtcataagaatgcgtcaaggaaaaggaccaacaactaaaatgacccatggtgataaaaatatagaagcacaccatagacaacaggtccctgttaaaaacggtgggatattagacgaattagaacaaagaactcatagaggcggaggtaatcacacacgtcatgaaaaaccttccctgctaactccttctcaaagagcaaaagagataagaggccactataaagaaagaggaaaagaatatatactaccaggagaagggatttaaaaggaggaaaagtaagtgacaagagatgaaatcaaaaatttattagatggtttattggataaagaattagtgaatttagatattccttcggtacgtgattgggaaaagattgaaaaaaaattcggatgtgagtttccagaggaatttaaagattttattgaattgatgtctgaatattcgtttccgggagatatcttaaatgtttccagtgggaaaacaaacggcaatgacactattgaatttacctatgactatgagataaaacaaggtggatggaaggaagaattaatcccattttacagtataggcaatggcgactacttttgccttctttccaatgaatgtccaaatacaggagtttactatttttcacatgaagaatcaactatagataaagaagcaagtaactttgaagaatggttaaaacagttgccaacttttttaagttaataaataggaaaacttgattggctaaatgcctttcaagtttttttaagagcggaaatacgtaatagtaaatgtaaagcctatattatgagggggaatcttctaacctagcccagttttaaatgagctattcaatagacggtaaaaaatattcagatagactaactaattatgcgggaggtaagtaagatggaagccaaaatggaacaaatatatcaacaaattgctgataccttagttaatatagttcctgaagaatggaaacagatcttattatatgctgaatatagagaaggctataaaaaaatttttttctactattacccggaaactagaataaaacctgtatatagccttgatataaccgatttatttcatatgaatgaagataagtatcatgaattggaaaataagctatatcattgtttttcaagattatgggaggaatttaaagagcaagagcaacaacagtggactaatttaacctataccctagataacacaggcaggatgaaaattaattatggttatgaagatctttttgaactcagccctgttgaaaaacaagagaagtgggaagctgaatatttagagcaagaaatagaatgaaacttgaaataaagctgggccaaaaggtcataaaaaagtgacctttttaggctcagccttttttctgggaaataacatgaaaaccataaaaaaacaccacttcttttacaatgaagtcacaataagcacacgctgatcaagtcgaaaattgtgttttatctactggttagagtgtgtgacgtggcttgcgatggtgtgaacagtagaggactggtgcgccttttattggcaagaaatcagtacctagcggaccgtttagagaagttaatggatttccagttaagtaaactcaggtgcacaagagaagcatattcttcagctccaaattacacataagaaattgcaaatagaaaacacaagagtatctttctatggcgataataaaaaagaaggataatatattttctaatggttcgtttaaccatgtgtttcatggagaaataaacaaaaaacgtaaggctgtaggttatcaccatgaaagtatgatgggtggcaagataatttagataactgatcctcctaataaatatggtgtataccgaggaatagttgagattgaaggtaaaaataaaaaggttccttctacattttttccaagtgattggaataggttcaagttacagaggcaataaaactggcttataataatagaaaggtgataaaagataatttatacgaaggtattttacctaatggtatgaaaattcaaatgagattagatcctgaaaataaaattaaaacagcttatccaatatattaggaagtgtataaaaatgaaatatgaaatcacttttaaggaaaacgaaagaggtttagaggtagaggtgccacaagttatttcttcagtagcaattcttctaatgggcgatgttcaaagcaacagtcaaccttggttaaacttaatacacaaggttttaagtggagagtcaatttatgaagaatgtacaggtaataattgtacattggaaattagtcaagatataacaaaaatacttgataactatagtgaggaagaagatgaatgtgtaattgaaactaaagaattagtaaagataatagaattgtggacaaaaaagataaatagcactgttgagtaaaattgttaaaaaaaccttgaatggctatatgtgaactgcaacccgaaaaatggacacttaaaaaaaagtccatttttcgggtttctgtgttcttttacaaaagacccgttataatcaaaacaaatgagaagaacggggaatgcgagatgagtaaacgactattttctgcgtttgaacaaaaacaattagagagtaatccgaatgtcaatcatgtttctgatcggtccattagttatgccgcagattttaaagtgagagctgtacaggaaaacttatcaggaaaagggccaatggcgatttttctagatcacggatttgatttaaagcttattggttcagataagccaggagaatgcttaaagagatggaggtcggtttataaagcctttggagaagaaggcttttatacagagcgtcgtggaaaagggagcactggtcgtccttcttcgaagaccttatctgccgaagaacaattaaaaaaggcggaagcccgaatcgcctttttagagatggaaaatgattttctaaaaaagctcgaagaattaggcaggcgaagaagaaggattaacggtatcagaaaggtttcagttaattgaacaaaccattagacgctatcagcttaaacggatgttacctttctctgtcatttggcacgcgtaaatcggtcaagctattatgcttggctaacaaacgaaaacaatcgtatacaccgtgaacaacgagatgaggacgattataaacttctgaatatcctctatacccaaggggagaaaaaagaaggcgggcgccaactaaaaatgaaattggaaaacgactatggaataacgatgaacctaaagaagatctttcgacttacccgaaagtttcagattcaagccatcattcgtaaaaagaatccctataaacaattggctaaagcgagtcatgaacataaaacgtgtgagaaccatcttaatcgagagtttgttcagctaccaggtgccgtcttattaaccgatattacgtacttatatttagcagatggaacgaaagtctatttgtcttgtgtcaaagatgggactacacgtgaaattgttgcccattatttaacgacatccttggagatgagtattgtgtataaaacgctccagcgactaaatggggccttggaggggaacgtccaccctggtgccattcttcattcggatcaaggttttcactacacacaccctaactatcaaaaaaagtgaaggcacttgggtttacacaatcaatgtctcgaagaggcaactgcttagataatgcacccatgcattatttaattaaacaaaaagaaagctagcttcagatggccacaatttagtgaaccgcacattctggatgcaggaagcttcgaagtgttggcgggacaatatgggcaacgtcttgtttacagccgccaaggcaagttgactttccaaaaaggaaatggtagctttattgtaagtgaataagatttctaagggatgttaccttttgggcataacctagactaatgtgcgtgcatgatcgatgaacgcctcttagtctaggttttttatttgccttaaacatcttcactgcacaaaaggagtgtgtcttatgtcaaattataaatttcctgacggctttctctggggtggcgccattgccgccaatcaagcggaaggcgcctatttggaaggcggcaaagggttaacgattgttgatttgttgccgactggcgaacaaagaagagcgattatggaagggtacgtccagtcactgattcctgaagaaggggtttactatccttcccatgaagggattgacttttaccaccgctataaggaagatattaagctatttgcagaaatggggtttaaagcactgcgtgtctccattgcttgggctcgtatttttccgactggtgaggatgaggaaccaaacgaagatgggttactgttttatgatcgcttatttaatgagcttttggcccataatattgagccagtcgtgacacttgcacattttgacgtgcctgttcatttaattgagaaatacggcagttggagaagtcgcaaactggtaggcttgtttgagatgtatgccaaaaccgtgtttacccgctataaaaataaggtaaaatattggatgacatttaatgagattaacatgctgcttcatttgcctttccttggggcaggacttgtcttcaaagaaggagacaacaagcagcagattcagtatcaggctgcccaccatcaattagttgccagtgctttggctgtaaaggcatgtcatgaaatcattccagacgcaaagatcggctgcatgctggcggcagggtctttttatccgtacacttgcaaccctaaagatattttcaaaggaatggagaaagaccgtgaatcttacttctttattgacgttcagtctcgaggcgaataccctccttacgcgatgcggtttttcaaagacaaccagttggacattgccatggagccgggggatacggaactattaaaagcacacacggtcgattatataggttttagctattattccagccggacaacgagtacagacccagaggtaaacaaaaatcaaacaaccggaaatgtgtttggttctatcgtgaacccgtaccttgaaaagtcggagtggggatggacaattgatccgctaggctttagaattacggccaaccaattgtatgaccgttaccagaaacctttgtttgttgttgaaaatgggctaggggctgtagacgaatggaatgaagagggccaaattgatgacagctatcgaatcgactatcttggcagtcatcttgctgcgttgggagaagcgattaaagatggcgtcgaaattatcggttatacgagctggggcccaattgacattgtcagtgcttcatctggcgaaatgaaaaagcgttacggctatatttacgttgaccgcgataatgaaggcaacggcacgttaaaccgcgctaaaaaagcaagctttgattggtataaacaagtaatagcaacgaatggcgaaagcttgtaagaataagcaaaaccggggacatccatttgtaggaaataaaacaatggatgaaagcgttgacgggtttgttagatattgttacaatcaaaaataattagattttcttaggattgttactgtttcgcaggcaaaacctaagtcatcgatgataaggggaacgagtgagcctttttttacccttttatctatggatggcttaggttcttttatgttctgtataacccatgatgaaaaggaaagaaacttggtgaggaatcatgaaaatagcgaaagtcattaacaacaatgtcataagtgtgatcgaagatggtgcagaacttgttgtgatgggcagagggattgcctttcaaaagaaagcaggtgcagaagtcgatcaagacagagttgaaaaagtgtttgcgttaaaagatacgcaaacgaaagacaactttgaaatgcttatgcgtgaagtgccgatagagttgatgactgtagtcgagaatattatcaattatgcgaaagacaagcttggcaaatccttgaatgaaaatatttatgtatctttaacagaccatattaattttgcgttggagcggcataaaaagggcgcacaaatcaaaaatgccctgctctgggaaatcaagcagctgtataaagatgaatttgaggttgggttaaatgccttgaagcaattggaaaaatgttccatgtgtccttaccagaggacgaagctggatttattgcaatccacattattaatgctgaaatgaatgaagatgtttccaatacaatgagcatcacaaagtttatacagcaaattatcaacattgttaagtaccattttaatatggaatttgaagaggattcgttaaattattttcgctttatcactcacctgaagttctttgcccaacgcgtattcaagggaacccattatcaaagcaatgacgattttctttacatcatgattaagcagaagcataaagaagcagcacaatgtaccgagaaaattaaggaatacatcatcaaagaataccagcatgaactcaccaatgaagaaatgctttacctcactcttcatattgaaagagtagttaatcgataatacgttcatagcgataggattgttactggccagcaggcaaaacctaagttgtgaaaatgcgggacttttttgtcgtgcgttttcatggcttgggttttttatatttataaactattgattaggagaatgagcatgaactatgaaagccttgcaaaagacatcgtcgcattagttggtggcgaaaaaaacgtaaagtcattagtccattgtgcgacgcggcttcgttttacattgcatgaccatgcaaaagcaaacaagatgaagctagagcacttaaatggggtcattgccgttaaagaaagcggcgggcagctgcaagtagtcattggcaacatggtgcccgaagtgtatcaagcgattggaaagacaagctctattttggacgatgccaaaaaaagcagtgcatcttcttcagaggagaagaaaggaaatccatttggacgggcaatcgacgtcgtcgccagcatttttgcgccgttgctcggtgttatggctggagccggtatactcaaaggtttgttgctaattgccaccaattttaactggttagaacagacagactcgacgtatgtgattctttttgccgcttcagatgccttgttttattttcttcctgtcctgcttgccgttacaacagcgagaaagttcgaagggaatgtatttacggccgtcaccattgcaggcgccttattgtatccttcaatcattgaattgaccaatgcggagacgtctgtaggctttttcggaatcccggttacgctgatgacctattcatcaaccgttattcccattatattaagtgtcattgtcatgtctaagttggaaaagctgttcaacaaattcatccatcaaagcattaagaatttcgtcacgccactgctccttttagtcattatggttccgttgacgcttattgtgttcgggccgatcggcgttaacgttggcaacgcgattgcggatgggcttctggctgcattttcttttagtccattaattgcaggtgcgattcttggtgcaagttggcagttgctcgttatttttggcgttcattggggactggttcctgtatttattaacaatgttgctgtatatggacaagacggcatcaaaccggctgccactgcttccgtctttgcacaaactggagcagcgcttggggtatttttaaagacgaaaaacaagcggctgaaagctcttgctggttcatcgacgattacggctttattcggaataaccgaaccgactgtttatggtgtaacgttgccgctgaaacgtccatttattgccggcatcatcggaggcgctgttgggggcgcgatcattggacaagcaggcacaaaagcatttgcatcaggggcaccgggtttactgacattgccgatcttctatggtccaggcggagaaggctttttcgggttaatccttggaattaccacttctttcgtgatttcttgtgtgctgacttacattcttggctttaaagatccagttgacgaagaagagcaagcagcagaaacaccacagcaaactaccacagaggctattgctgacgaggaaatcctcagtccgctcgaaggaaaggttgtcccactatctgaggtgaatgatccagcatttgcttcagaggcaatgggcaaaggaatcgcggttgatccgtctagtggtagagtggtagcgccagtaaacgggaaaataacagtagcttttcaaaccaaacatgcgattggactcgtttccgaccaaggcgcagaaatcctgatccatgtcggcttggatacggtgcaacttgacggaaaacatttctcttcttatatcaagcaaggggatgaagtgaaggttggtgatcttcttgttgagttcgacattgccaaaatcaaagaagccggctatcaaacagttacacctattattattacaaatacaggaaattaccaaaatgtagaaccggttcaagtggaaagtgtgcacgaacaagatactttgcttagcctggttgcgtttgaaagtaacaaagcatgataacggcaaaaaaggccatctccagatggtctttttgttggttttggaatcggaaatttgttcatctatttatttattggctgggatttacgctttatttttcacacacaataacccgcacatcattattccgatcctattttttgtccttagtgggtactattttttgcagcattattcaattaaacaaggagagaataagtctgattaaaatacgaattccagttgattcactaaagtgtagatgcttgatttcttctagttttgtaactataatggttacaaaggggtgattcgcgaatgaaaattagctctcgattttcggtagcggtccacatcggcgcgctccttgcaactgagcggacagccgttttgacatccgaatggatggctgcaagtgtcaatacaaaccctgttgttatacgccgcatttctgctcaattaaaaaaagcaggaattattgaagggcgtagtggcacaggcggagccaagctggcaaaagatccagacgagctgacattgctcgatttttaccaagccgtccaagttgttgctgacaatgagctgtttcatattcatagtgagcccaatcctaattgctacgtcggcgccaatattcaaggggtgctcgaagtgatgttaggcaaagcacagcgggccatggaagaagtgttagctagcatgacgcttgcagatgtgcttgctagttttcctggaaaaatccattaggattttttctgttttaaatgtacctatttcgattacgaaaataaaaaaggagagattgattgtatgaaaacagccgttataggagccacagggaaagcaggtcaattaattgcacaggaattaaaaaaacggggccatcatgtaacagcgattatccgcaataaaagcaacctcactgctaatgtggatgatgttattgaaaagaatgtcaacgatttgacggcaacagatgtgatgccgtttcaggccgttatcaatgcaattggcttcccgcctgaacactcagatcaacacgtaacagttggccgtcatctgatcgctatttttagcgaggtgaaaacggctcggctgcttgttgtcggtggtgctggcagtctatacgttgataaaaaccatagccggatgcttaaagatatgccttcatttccagatatttttaaaccgatagctgaagcgcaaagcaaaaaccttgctgaccttcgggacgtcaaaacgtttgattggacgtttattagcccggcagcagattttcgtgtagatggaggcagaacaggcacttatacaaaagcgagcgaagaattaacaacgaataaagagggcaacagttacattagctatgctgactttgccattgccgtcgccgatgaagtggagcaagcttccgtattaaaaggccgttttaccgttgtaggtgaagaactgtaataataccagatttttttgaagaaaccgtgtaacaagctgtcagaatagggtgtggtgtgatgcaaggaagaaacaaacatcgcctattcgtttatggcacattgcgaaaaggcggcacaaatgaccattacttgcagcaaagcgagttagtggaggacacatgttggatcataggggaaatgcacaatacgccatttggctatccaattgtccgttttcgtggacaggagaaaattagaggcgagctttatgcggtcacaagcgaggaactcatccgtattgacgaattggaaggctataaccctgaaggcaaaagtgaaaatgagtacgagcgtgtcgaatgcactgtctatacagacgaaagcgagacaaatgcttacacgtatatcgctggaattggtttcgcgaatatcaatgaaccgatcgttggcggggattggctcggttttttggcaggaaagaaaacggaacgctgacatttgaaatgcatttccttgctgtaaagggtgccaataggaaggcagatgtggaaataggcgagcaaacgcgctcgccttagattgatgcttaagcaaatgtacgcagaacgctggacacggtatcaatgagaaaagctaaatcttcttcgctagaagtgagtggtggggcgataattaaaacattgcctcctcctggaatcgtgtcgctgtttttgccgatgatcagcccttgtttttggcaagcggttacaatcgctttcatcgtatcgtcatcagctggctccttggtctgtttatcttgaacaagttctatgccgtaaaggaagccaattccgcgcacttcgccgacaatcgaaagttgttcaagttgtttcaatttgccaagaacggtatggcctagcgtttcgactcgattgacaatctgttcacgctcaataatatcaatcgcttttaacgcgaccgcgcaagacgccgggtgtccgccgtaggtggagatgtggcggaaatggctggtctcgccttttccatcgaatgcttgatatacattttcggcaacgcacgtagcgcctagtgggagatagccgctcgtaagcccttttgccagtgtgataatgtcaggtttgaaatcgtcatcgccatgcataaagccgaatagcttgccggtccggccgaagccagagacgacttcatctaaaatgagcaagacttgatagcgatcgcaaatgtcgcggacacgtttgtaatagtcgtttgattgagggtaaatgacgccgccgccggaaataatcggttccattataaacgcggcgattgtttcagggccttcccataaaatcgtttgttcaagaaaatcagcggcccgttggtcgtcttccgcagcagagccaaagcttgatcgataggcgtaaggcggtggaatatgcaaaaagccaggcaaagcagcgtcgtactttattttgcgatttgcttgggccgtagccgcaagggcgccaagggagttgccatggtagccgcgataacgggaaatgattttttgtttttctggggagccggtttgcttatggtattggcgcgcgattttaaaggccgtttcgttcgcgtcagagccgccgttggcaaaaaaggtgcgaaacccgccaccaagcaaagcggctaatttttcagccagagcgatcgctggctggtggccaagggaaaggggaaagtaggcaagtttgttcatttgctcagtcgctgcttcaatgatttccgtttgcccatgaccaagatttaggcaccatagcccagagactccgtccatgtagcggttgccatttgtatccgtaaaccacgacccttcacctgaatcggcgataagaggcgcggcccctggacgttgcatcgcatgccagacatattgctcgtcttttttagccaatgtcggttccattccagtgttcactgtttaatcgcctcctcgtgcatcgttcgtttcaatgccgtttccaataggacattgacgcccttttcgcagtcctcccaagaagtccattcttcctcagcgtgactaattcctccccggcttggaacaaaaatcatggctgtcgggacaagggaagaaataaattgagcatcgtggccagcgccgctcaccatgcgtttacaaggatagccgagtgctttagccgattcttctacttgggcgacgaggctgttgttaaaccaaaccgtctctcggctccatcgctttgttgcctgacaaggaagggagcatgctccggcgacttcctgaatcacagtctctactgcggccagtaccgcttcgtcttgatgcctagcttcaagagtgaagacagcacggccaggaatgactgtatggatgttcggaaacacattaaagcgtccgatcgtataaacgagcgtgtcgtctaacggtgctagcttttcgtggaaagcggtcatgcaggcgttggctgcggtaagtgcatcatgacgcatccgttgcggcgttgttccagcgtggttggattttccgcaaatctcgatttcgtaacaaaccatgcccacaacgcactcaacggcgccaatggtttgcttttctgcttctaaaactggtccttgttcgatatgcagttctaaaaaagcgcttgcgtccgtcagccgatggtgggccgagccagcaaaaccactcgccgccagagcctctccaaaagaaacgccatcttggtctgttgattgcaacattgcgtctttgctaaattttccagccaaaatccctgatgccatcatcgaaggctcaaaacgggcgccttcctcgttggtgaaattgatcagtccgaggggcacatttaattcaagcttatgttcgactactgtgcgtagcacttctaaggcacctgcaacaccgaggacaccatcgaaacgccctcctttttttaccgtatcaaggtgggaaccaaggtagacgggcgggacatcgcgctgttttcctggaattacactgtacatgtttccgagatcgtccgtcgttactacaagcccgagcgcttcacattgctggcgcaaataagcccgtgcttgctggtcttcttcagacagggcaaggcgtgtgacgccattgttgcctgttgccccaaatgctgcgaacgcttggagcgtttgtttaagccgctcgtgattgactgttagcttattggtgttcatgggcattgcctccttggctagtaacggtttgccaggcttgccttttacaaaaaagggttgaagcatatttacgtgcgttggcgtttgctgctaaaaaggttttggttgtccctgctttcgtgaacaataccgtggagccgtttaagtgatcggaaatcgatgcaattttatagccgtctgcgataagcgcatcaattgctcctttttctttttgaaagtgggtatgttccgccatcaaacctctcctttcgacatcgcttgttcatgtttgcggaataaatgggcaagtgcccacatatcagcgctggcctactaaatcgttcgtccataactccccatagcgcgcccgttttagaaacgctccttctcctggagtgccgacataggtttgatcacggacgataacttttccccgcgacagcacggtccgcggcgtcccttttacgcgcattccttcaaaggcgctgtaatctacagcgaggtggtgtgtacgagctgacaggacacgctctgcttgggggtcaaacaagacgatgtctgcatcggctccgacagcgatgcagccttttttcggatacagtccgaacagtttggctgcccgtgttgagacgaggtccacaaactcgttaaggccgatgcgccctttggctacgccttctgaatacaggagcgaaaagcggtcttcaataataggcccgccatttgggatttttgtaaagtcgttaacgcccaagtctttttggccagcgaagtcaaacgaacactggtcgctgccaatggtttgcaatgcccccgtttttagcgccttccagagggcgtcttggtgctgtttttcccgcagcggcggcgaccatacatatttcgctccttcaaatccaggttttcgcaacatgctttcatcaagcactaaatattgcgggcatgtttcgccccaaatgtctgccccttgcttacgcgcttcggcaatttgttggacggcctcttggcaagtgacatggaccacataaagctgcgactgtgcaagggaggcgagctggcaagcacgcccggtcgcttctccttccgcttcaacagggcgagtgagagcgtggtaaataggcgccgtttttccttctttcaacgcttgctttgttaaataatcaatgacgtcgccattctcggcatggaccataactaaagcgcctagttctttcgcttttgtgagcgtctcaaatagagtggcatcatcggcttggaacacatgcttatacgccataaatactttaaaagatgaaatgccttccgttgagacgattgctggcaattcattgagcacagcttcgttgatttcaccgatcattaaatggaagccgtagtcaatggctgcttttcctgctgcttttttatgccatgcttctattgccgtatgcagcggcttttctttctcagtcaggcaaaaatcaatgattgtcgttgtgccaccataggcagccgcaatcgttcctgtttcaaaatcgtcttttgtgacagtgcctccaaacggcatgtccaggtgtgtatgggggtcaatgccgccaggaaagacaaagcagccgcttgcatcgatgatttcgtctactccttgaacagccaattgttggccaatttgcgcaatcgtttcaccttcgatcaacaagtcagctttatacgtatcagaagcagtcacgatcgtcccgttttgtataagtcgtttcattgttttccccctaccatctcttttttcggccgcttgtgtttaagctcggttcagtcattggctatagcagcctgccgttcattccaagacattggcggcagcccgttcggttttggcaccatggcaatcgctccctctactgggcaaacaatggagcacaagttgcagccaacgcattcgtcttcatcgactttcaagtaaggagcaccgttctcgtctgtatagcggccaatgcattggtgggccgtatcttcacaggagatgtggcatttgttgcagttaatgcatacatcccgattgattcgagcaacgacttgatggtttaaattgaggttgccccattcagaatagcgatgaaccgattggccaactaattcttgcacggaagcaagccctttttcctctaaataggcggatagcccatcaagcaaatcttcgacaatgcgaaagccgtggtgcatggcagcggtgcatacttgcacgtttgaagcgcccatcagcaaaaattgcaccgcatcttgccaagtagcaatgccgccaattcctgaaatcggtatattgacattcggatggcgggcacaatcgccaagcatatgcaaggcaatgggcttaacagctgggccgcagtagccgccatgagtgcctaggccatcgacattcggtatcgtttgccaagtgtcgatgtcgacgccggccaggctgttgattgtgttaatcaaactaatggcatctgcgcctccctgagcagcggcctcggccgtggcggtaatatcagtaatatttggcgtcagtttgacgataacaggtgtcgttgccacttcttttacccaaacggtttgctgttcaacgagcgcaggcacttggccagaggccgaacccatgcctcgttccgccatgccatggggacagccaaaatttagttcaagaccgtccactcctactgcctcgacgcgtttgacaatctcatgccatttttcctgtttaggttccaccattaatgaggcgacaatggcatggttggggaaacgtttttttgtatcggcgatttcttgcaaattaacatccagcgggcggtctgatatcagttcaatgttattaaaacctgccacgcgcttgccattgaagtggagggcagcgaaacgggaggtggagttcataatcggttcgccaagcgtcttccagacggccccaccccaaccagcctcaaacgcccgctgcacttgatagccagagttggtcggcggagcgctggcaagccaaaatggattaggcgatgtaatgccagctaaattgctaatgaggtcagccatcgaattcctccttatgcgctcgtttcagcccgttggctgcgtcgttttttatcaattgcgtacgccacttgctttccttgttcggcagccgcaactaccattgcttcaccttgcccttggccgaatatcgcgtcgccgcaggcaaaaacgccttttacagatgtttcatagtgatggtcaattgaaataacaccgttgtgtgtagcaatgccaacatcttcgagccaacgatggcgcgcttgcccaatcgctttaatgataaagtctgttttgatgacaaatgtcgctcctgttggaatcggtgttcttcgtccgctttcatctgcctcagtcaaagccatttcggcgcattttaaagccgttacgcgccctttttcatcaccaagtacagcgataggagagacaagccagcgaaattcaacgccgtcttgtttggcaaactcatattcaaattggtaagcagtcatttctgcttctgtgcggcgatacagaactttgacgttttccgcccctaaacggacagcgcatgtcgctccatcaatcgctgtgttgccggcgccgatgacaacgcctcgctttccttggaattgttggggcaacgtggtggacttcgttgcctttacaagatcaatggcatcataaacgccatgaagttcttcgccgggaatgccgagagggggcacgtttgccatgccaaccgctaaaacgacagcatcaaaggattgctgtagctctgcaagagaaaggtcgactccaatacgcgtgtttgtctgaatggagacgccgagagacttgacctgttcgacttcccataaagagatgcgctttggcagacggaatgagacgatcccgtacgtatcaaggccgccggcttccgtttctgcctcataaacggttaccgcatagccaagcaaagcaagctcccgcgcggcagataaccctgctggccctccgccgacaaccgctactttctgtccgtttcgtttgcccgctgtaaacaatggtttctcgttttggatcgcccagtcagtcgcataacgctgcaatttgccgatcataatcggtttcgatgtctgattcaggacacacgcgccttcacatagttcttccgtcgggcaaaccctggcgcaactggctccgatcgggttagcctccatgatcgtccgagcggagcctgtcaaattatttgttgtgattttttgaatgaatgaggggatgtcaattccggtaggacatgcagtaatgcatggtgcatcatagcaataaaggcacctagttgcttcatctgtcgcttcttgggtggataatggcggttcgacttcttggaagttcaatgggatggattccgatcgttccatataatagcctcccttttgtgacagtaccagttaggcacaagctggtatttaaataactatatgatagaaataattgaaaatcactgttatcgttagattttctatccaattccgaatgaattggacaaagtggcttcttcttttaaatggagaacagcatcgaggcagccaatccgtttaggtacgtgtataatagaaggaacgaatgataacttttacaaagaggtcttgtcgatgaactcattcttaaaacgtgtgcggcttgcagtgcgacttccgcaaagacaggcggtgttccaactgaacaaagaacggatcggcgtcccgtttttatatgttggtttgctgtcagcccttgtttgtatcccattgtctattgagacatttttacagtccgaaggaattattgccgatttggcgttgcctatgttccttgtctattttgtgtttgtgtattttccgttatttgccctttccgtttacagccttatagcggttgtgacggcattggcaagggcgatcgcgctagcggctaaacggaaattaacgtttttaatgctttataaaatcgcttgctttgcggcaacgttgccgatcctaggttacggtgcgtgcttgctcgtaaatgaggattgggctaaaatctgggttggaatcagtatcgtgtttatactcgtgcttttaattcggctccttttccattatccacaggcgaataaaagcaagttacataaacaaatgaaataaaagtacacaacgttggactgtgtggtcgataaaaaacgttactaataagctagcctcccatctgtacaaacaagaaagggagcttggtcatttaatgagtctccctggttaacttacaacctaaaagagaatggttgtaagggtggaaacggaatttacaacaaggttttcatttcctgaaaaaaagggtatactggtcataataaatgagtaaagtaaaaagactgaaggtgttccagcaccttcagtcaaataatagctcggttccctgcaagggggatcggccgatggttacgaataatccacctgagccgctaactcaagggtggattattttttgtggttgtgaaatgacagcaatgcaacgatcagtagcccgaacgtcaacataagggaaattccttcaaatactgtcatacagcaacaccccctttcatgggagtgtgccgaccacccttgagtaaaccgttatgctattattctcaaattatagcacgtttttccattagtctctattgttcgtagcctcttttagagactgtcagttaaacatattgcatggaaaggggattccctttactagctaaatttctatctttctgtaacggcaatcgatgcctgaagccctgtagcgaacaaaaaaagaagctcacaacatggtccgtgtgagcttctttttggtcgttacaaataaggagctaaaaaggcaccagtaaatgagcttttttcgcgagcaatgtcttgtggctttcccatggcaacgactttcccgccagcgtctcctccgccaggccccatatcaatcacccagtcggatgcggcaatcaattctgttgtatgttcgaccacgacgacggtattgcctgcgtcaacgagctttccaagtaaaacgaacaagttttcaatatcagaagggtgcaagcccgttgtcggttcatccagcaagtaaagggtatggcctgttgtctgtttggccagttcctttgccagtttcaaccgctgtgcttcaccgccggatagcgttgtgactggctggccccattgcaagtagccaaggccgacttcacaaaggagctggagcagcgctgttaattttttttggccgtcaaatagcgctaaactctcttcgatccgtaagtttagcatgtccgcaatggtatagccgctaaatgttacggcaagtacgtcctttttaaagcgtttgccgtggcaaacggggcattctacttgcaagtgagaaaggaaatgcatgtcaacggcaacttggccaagtccttcacaacggtcgcagcgtccgcctggcgtattaaatgaaaagctttttgcgtttaatccacgttcttttgcgatgggcaatgcggcaaatcgttttcggagataggcgaacaagtccatgtacgttgcgacattggaacgctgcatccgggaaaggggcgcttggtctacgcgaatgatcgcgtcaacttgttcaagcccgctaatatgtgggcagccttcaaaatgggacggagtcgcctcggcgagaacatcgaaaacaagtgacgatttgcctgatcccgaaacgcctgtgactgcggttaatgtttgcaatggaaaagaggcggtgacgtcttttaagttatgcttgttggctttgtgaatggtgattgttttcccatttcccggccgctttgccccttgcaggcggcgctcgcgttttaaataagcacctgtaatggaagcctgttgattcattagctcggccaacgttccttggccgacgatttctccgccaaaccgccctgcggccgggcccacatcaatgacatggtccgcttcagcaatgacacgtgcatcatgttcaataacgagtacggtattgcctaagtcgcggagctgcttcataatatcgaccagcccatctgtgtctttagggtggagtccggctgtaggctcgtccaataaatacaagacgcctgtgagacccgagcctaggatcgaggcgaggcgaagccgttgagcttctccgcctgaaagtgtgactgaattgcgatcgagagacaaatagccaaggccgatgcggattatacgctccactttgacagacaaatcatggagaacggtatgaagcaacgagtcaccagcttgttggtaaaaacgttgcacgtcgccaatccattcgtgtagatcatgaatggagcttttgcaaatgctaggcagtgttcggctgcagacggtgacttcccttgtttccttttttaagcgctcgcctttgcaacttgggcaatcttgcaggataaagtaagcagcctcgcctgactgcccgttcttttcttggtagcggcgccacatgccagtcataacaccctcgaatttgcctttgcttacagttttaggcggttttgtatgggggaaatggcgtgcaaacgcgtcgctttctacgccgtggaaaagcaagtcgagttcagcttcgctataagcgttgagcgctttatttccgcgaatgtcgagttcataatagcgccccgctgcttcaaggatagctgtgtaatattgccggacactatcgtaccagaaggtgacagcgccttcttcaaggcttttgtccatctggaagacggcttctttgttgatgtctgtcaccgtgccgaggccgctgcatgaagggcaggcaccgcttggtgtattgaatgagaacgctgcttttgttaacggttcatggacacgggcacaggcagggcaatggattgcctcttgctcgtcgacaggcggtgggatcagtgtttgacagtctaggcaccgtctttcgcctttcttttgaaagatgagacgcaaatacgtatacatatccgtcaccgtgccaactgttgaacgaggattgcgattggtgcggtgctgattgacggcgatggacggggacaggccgtcgattgaatcaacatctggtttttcgagtgactctcctgattccccgttcgattccatgtattggcgttggcattctcgttgcaacaagtcaagtgccagtgtcgacttgcccgatccagaggggccagtaacgacgacaaactgatgctttggaatatcgagtgacacgttctttaagttattttcccgtgcgccgcgaatgcggatcatatccttcatgcaaaaacctccttaaatggttgtgcccttttagagggagcaagttttattctataacagtcatgcaagtgataatgtttgaagaaagtttctcccatgtaaagcgattttccgaaaaaaacattatggtagcactttaaggatttgtaagaaggtttgcgggaacgttggccaattggtatagtgaaaacacgagtttgcaaggagggcatcaatgaagcattaccgaccaattgatattgcgcgtgaactgaacattagcacgagtgcactccgccattatgagtcgtgggggattattccaccgccagaacgggcggccaatcagtaccgcctttatacgaatgaacatctcgcctatttccgttgtctccgcgctatgattcctggttttggttttccgttgacagcaaaagtgctccgtgccgtccagaatggcgacgtggacaaggctttttggtttgttagcggagaacaggcacagctgtacaacgaaaaaacggtcgcagaacaaacgcttgccttgctccgcaatccagatttatcgccaattgaagggaagaagttaaaaagccatatgacgattggcgaggctgcgacactgacagaagtccctccttcggctatccgccattgggaaaaagaagggctgattcatccaggccgtcatcccgaaaatggctatcgtttgttcacgcccatgcatatccgccaaattttattgattcgcacgatgcgccggaccgtctattttcttgaaaacataaaaaaagtggttcacgcccttgaacatcacagtgtggaagaagcacagaaaatgacggaacaggcattgtctacactccaccaacgcaaccgtgaccaattttggggcatccaaaaactaatggcgctctgccatgaagtggggctcattaaagaagagtggaaaaatttttatttttagcgtgcgtcggaagcctggaatcgaggaatgtagatgcagggaaaggagagggcttgtcgcttaatggaaaggtgttcgattaaaaaagcaggggagagcagttggccgaaaacgtataaagccagctctctccctgaatctttatccttttgtccctgaaatgacgacaccttggatgaaatatttttgcgccaagaagaacaaaacgagcggtggtatgacggccatcactgaggcggccatcaagagctgccacggtgttgctgcataagcagcggtaaaattggcgagccctaacgaaagcggatacaaatcttgcgtgttcaaataaatgagcggtccgatcaagtcattccagcgaaacataaattcaagaatggcagccgtagccattgccggaaacgacagcggcaaaatgatgcggaaaaaaatcgtaaagtagccgccgccgtcgatagtgacagcctcgtctaattcttttggcaaccccatataaaactggcgcaacaaaaagattaaaaaggcgctgccagccagcatgggaacggttaatggcaagtaagagtcgacccagccaattttattgaacagcaagtattgtgggatcatcgttacttgtggcggcaacatcatcgtgctaagcacgatggcaaataaaaatgtttttcctcttgcgcggaagcgggcaaagccaaaggcaatgaaggcagagaagaacacagtgccgcaaacggtgacgattgtgtaccacgttgtattccataaataggtgccaaaagggtggttttgaaacacctctacgtaattgctccaattccagttattcggcagcaaagacagtggctctgaaacaatttgttccagcgatttcagcgacgtaaacaccatccataatacagggaacaaaaagaaagcaaggccaagggctaatgcagcgtaagtgaaaactttaccggcggtggacagctccccaggcgcgtaattggttttgcgaaagattcctttcatcagaaagcctcctttccttacttgtcatattcatagtggaccgattttcttgacacataaagggacaagaacgtcaacgcaaaaatgattaaaaacaaaatccatgcttgtgcagatgcgtaaccgatgcgattttggaaaaaggccgtttcaaacagatagtagacgtaaaagtaagacatccagtcggggccgccatccgtgatgacgtaagcttgggtgaaaatttgaaaggaagaaatgagcgcgatgatcccgttaaaaagaatcacaggcgatatgagcggcacagtgatattgcggaatcgccgccatgccccggcaccatcaatggccgccgcttcgtacaattcttttggcagctgttgcaggctcgctagaaaaataatcatggtactgccgactgctgtcagctgcataagcacgaaggaaggaatgacggtataagggtcagtaaaccagccaggcccttgaatgccgaatagttcatatagaatggaattgacgatgccaaattgggggtttaaaatccacatccataaaaaagcgacggagacgccagaaataatcgaaggggcataaaaaaatgtgcggaaaaatgcttgcccttttattttcatgtttagaagcatcgccaatcccagtccaacgatcatcgtaaatggaatggcaagcgctgcataagcgaatgtcacaaacagcgatcgataaaagagcgggtcggaaaaaaggttgatgaagttttgcaagccgacaaaagtggctgtgtccatgatggcataatcggtaaaactaaagtacagcgatgcaagaatgggtccgccaataaatagcaaaaagccgacgagccaaggggaaataaacagccaaaaatacttttcttcacgccgtgccccaatcgatacggttttgtttgctggctttgacaacgctcttggataagttggttgtgccacgatcatccctccttaataagttagcgcctttaaattgttctgaagctcttccagtccttcctctacgcctttgcgccggtcgtaaatagcattaacggtcatgttttggtgcttcatgataggcgcaaaattagaaattaagtggttgtctgtcgggcgtccatatttgagtgcgccttcatctgctttgcgcaaatcatccactgaaatgcctgttcgctcggaaatcagttcataccaaagttctttcaattcgctatgagcggggctttctaacgtcatttcgaccatccatttagcagctttgtctgggtccattaaaaatttgaggaattcccatgcttcttctggatgcttgctgccttcgctaattgaccacgggtcgacgtaaaggggaatttgccggtcttcgtttgtataaggataagctgcaagcccccagtttaagtcagtattagcgtattggcgtgtcccccaaccgcctttcatgaccatgccgacgcgcccgcttaaaaatgggtcacttagttgcgcaagtgcggccacttcgctttgcggcggcatcacttcgtgttcgttaatcaaatcgtaccgtgcttggatggcttcgtaattgcgtgggttggttgtcacagtcggctcgactagttctcctgtttcatacgtttcctcagcaaataagtcgccgccaaacatccatgcatcccggttaggggaattgtcattcaaaatcccgtaaacgcgctgggtcggcggcagatcgttttccgtaattgcttttgctgcttcaatcattgcgtcccagtcccagcttttatcttcccagtcggtcggcggcggttcgatgccagccgcatcaaacaagtcacgattgtagtaaagaaaagagcccatcgataagatcggtagcccaaaagttccttcctctgtgcggtaaatttccaacaatgtttcgtcaatgccttctaccacttctggatcttgctcgatataaggcgttaaatcttttaaagcacctagcttatggtaaccaccaaagccagaatcagcccagtttggcgaccaaacgtctggaacattgccgccagcaatcattgtttgcaacttttggtcaatttccccttgtggaatcgtctgtaagcggactttaattccaggatgctctttttcaaactcttcaatgacccggtgctcccatttaattaagtttgggtcgctgcggacaagccatgttagttcgacttcgtttgttgtcactgcctcttcattcgcacagcttccagtggccagcaacggcagcagcaacggcataaaaagcagcggtttaaccgatcttttcatgaaagtccctccttagttaattgtaaacgcttacattgatgagtaaatggttcgctttccctttgcgaaatccttccttgttgctacacaatcctgaaacgaatgacttcattatttatatgcatgaggttgtctgttgatgttaaaccagtttagtcatcgttttgtgtagctgaatcgcttttttgctaagggcaagaatgatatactattttgaaacatctgcgaatgcgaggccaccgctgcaaatgagggagtgagagcaaatgcgtggacaacacctgcaattttatcctttaagcgaaggagcgttgacggtatcgtttgccactggcattcgtgatacaaccaatacgcggataagacagttgatgaacgacttggacaagcgtcgttttcctggctatattgaagcagtcccaagttatacgggagtaacggtattttttgaccctgcccacgttgctggcgcagccatgaaagggagcagcatttgtgaaaaagtggaatgttggctaagggaacggattgatgctttaggggaaagcgaacaagcttcacctggaaaaacgattgccatcccagtatgctatggcggcgactatgggccagatatagccgcggttgctgcccataatcatttaagcgtcgaggatgtcatcaacaggcattgtgctggtgactacctcgtttatatgatcggatttgcccctggtttcccgtttctcggcgggatggacccggccatttccgcgccaagacgaaaacagccccgagcggtgattcctgctggcacggttggtattgccggtggccagaccggtgtctatccactagaaacgcctggcgggtggcagcttattggcagaacaccgcttgtattatttgaccctgagcgcaagcaaccaagcttgcttgctccaggagatcgcgtccggtttgaggcgatttcagcggaaacatatgaacacatgaaagaggcgggacgatgagcatttcgattttaaaagggggattgttgacgacggttcaagatcttggccgcaaaggttatctccatcaaggggtggttgaaggcggggcaatggacaagctagctctccgcagtgccaatcttgcagttaaaaatgaagaaggcgctgcttgcttagaaatgacacttctcggccctacgattctatttaaacaagcgagtctcatttgtgtagcgggaaaaggaatgaccccctacattgaagggaaaccatacccgttaggagcggccatttctgtccctgctggccaagagcttacttttaaaacggccaggcaaggagcaagggcttatttagcgatcgccggtggaattgatgtgcctgctgttctaggaagccggagtacctatttacgtgccaagcttggtggattcgaaggaaggaaattggaaaaaggtgatcttctcccgattggaaaggttgccaagcatcttgcccctttactaaagaaagcagataagcaaggttgtccccttgtttcgaattggcatgtgaatggttcattgagcgattctgtatctttgagtgagaacgttgtccgggcaattcctggcagccatttttcaatgtttacaaaagaaagccaaacgaatgtgtttgatatgtctttcacgattcaaaacaactccgaccgaatgggctatcgccttcagggagaagcgccgctcttacgtgaaacaaaggaggagttgttgtctgaagctgtcacgtttgggaccgtacaagtgccacctgatggcgagccgattgtactaatggctgaccggcagtcaacaggtggttaccctcgaatgttgcaagtcgctgctgttgatttgcccaagcttgcgcaaatgcggccaggggatgcattttcttttgaaagaataactttggaagaagcgcaatatttatttttgcagcaggaaatggcgatgcaacaacgaaaggttggaatcacgctaaaatggacggaatggcttgcacgataagtaaaaaacgacaaacggcagaagcgttgtaggttgctgcacattcatttgacaaatcatcacaaattgaaatgaaaggcccgatgtttaaatggaaaaacgattatctgaaaaggagcgcagccggtttttgcgcggtgctattttcttaatggctacttcggcaatcgggcccgcttttttaacgcagacggcgagctttacggaaacataccttgctagttttgcatttgcgattttattgtcgctccttattgacatcggtgtgcaaatgaatatttggcgggtgatttccgtttcaggcaagcgtggacaagaaatagcgaacaacttgctgcctgggcttggttatgtgattgccggtttaattttgttcggtggttttgcctttaatattgccaatattggcggtgctgccttagggttaaatgtcctttttaacttgcctttaagtgtaggcggcctcattgccgccgcattaacaatcgggctctttttagttaagcgctttggcccgattatggaccgtgtcatgcaaatatgtggtgtagtgatgcttgtcatggttggttttgttatggtgcggacaagccctccttatcaagaggcgcttataaaggcatttgtaccagacgacgctttggcgttgctattgccaattgtgacgattgttggcggaacggtcggaggctatatttcttttgctggcgggcaccgccttattgatgccgggattactggaaaagaaaacgtccactttgtcggcagggcagcatcgcttggcattgtcacgacaatcatcatgcgcacatttttgtttctcgcagtgctcggcgttgtgtctgcaggttttagcctcgatgcaagcaatccagcagcaaccgcatttttggtcgttctaggcgacacaggctattatatgttcgggctggttctgtttgttgccgccattagttctgtcattggctgtgcgtacacaagcatttcatttttacgttcattccatccacttttctctaaatataatagcgtgtttattgccggatttatcgcgatctcggcaagcatttttttaacgatcggccagccggttacgttattgattgtggctggtgctttaaatggattgatcttgccaatcgtattgacgacaatcttaatcgcctcacgcaaaaaagaaattgtcggcgactatcatcatcccacgccattattggttttcggggtggttaccgtacttgttactggagcggcagggtacatcgcattagaaggcatcgctacgttatggactagctcataaggaggagacattgatgaatgccattgatctaaatagcgacgtaggcgaaagttacggcgcctacacgatagggaacgatgaaaaaatcatgccttacatttcatcagccaacattgcttgcggattccacgcaggcgatgcccatgtgatgagggaaacggttgcacgtgcattggaacatagtgtcgcgattggcgcacacccaggccttcctgacattggcggttttgggcgtagaaacatcgacatttccccacaagaagggtatgaactggtcgtataccagattggcgctttatgggcgattgcgaaagcgcaaggaggcaagctccatcatgtcaaaccacatggcgctttatacaatatggctgccgctgaccaagcactagctgaggcaatcgccaacgccgtttacgatgttgatcccaatttggtcttttatggactggctggaagcgccctaattgctgctgggaaaaaagtagggttgaaaacggcaagcgaagtgtttgcggatcgcacgtaccaagcagatggcagtctaacatcaaggcgtgccccgaacgctctaataaccgatgcaaaagaagcgtctgaacaagtgctgcggatgatacaggaaggaaaagtgcggacacagcaaggcaccgatgtaaagattgacgcacaaaccgtttgtattcacggagatggcgcacatgcggtcgcatttgccgagcagctcaaaggagagcttgaacgccatggcattactgtaaaagcaggaaacagctaacggcgaataagagaacaggcgaacatgaagagaaaggcatgctactggaaaggctgcttttctcttttaccactatgagatgacttgttgagtgacacggaattggtagaagaacatctcttcaaccactccaaagccagtgaattaaagttttacaatgtctgcttgaagggtttatcttgttgtaaggttggttgtaaatgctaacccaactgaccgaaccctttttcacatgagatatctgaggcgaggatgtcgtaaagatattgcttagactgctctaatttcctttgtgcttcttcgatttcctcaattttcgcttggagtatgcgagtatgctcttcctttgtaaatccgttccgctcaatcatcgacctcacttcaccaatggaaaagccaactgctaagagcgttttgacggcttgaaggtggtggatgattgtttcatcataatggcgataattcttttcgtccctggtcacataatgttccggaacgatgcccattttttcgtagtaacggatggtcgagatgggcaaatttaacgttttggcgacttcgctaattttcatgatcaatccccctgcttttttcttgctatgaagtatactttatagtttaggatttttgtagtgaagtgcttaatgcttcactaaatccaggaaaagtgggggataccgatgtcatctacattaaaaagcaacgactttacgcaaattatcaaggggcgccgttcgattcggacgtatgactcgacttataaaataccaaaagaggagctcctacgtatcattgaggatgctgcgtcggctccatcttctgcgaacttgcagccttggcgtttggttgtagtcgatagtgatgaaggcaaagaaaagcttcgtccgctcgttaaatttaacacaaagcaaaatgatacttcatcggcaatgttgttagtgtttgcggactttaagtcctatgaaaatgccgagtacatttttaataaagcggtggatgaagggaagatgccagcggaagttcgcgaccagcaattggccgccattcagtcccattacccaacattaccgaaagaacagatcaacgatgtcattaaagtggatagtggcttgtttgcgatgcaactcatgctcgtcgcaagagcatacggatatgacacaaatccgattggaggctttgaggccgatcaactagcagaggcttttgcgttagatccagaacgatacacgcctgtgctaattctttcaattggaaaggcggcagaacaaggctatgactctgttcgtttaagtccagagcaaattactttttggagatagagaagggtagaggatccatacttacacttcgttttcaaagataaaaaaagaagcactgttcttagtgaacagcgtgcttctttttttatcttattgctctcggagatccagtagatcttggtgatagcctcggtttgctctcatctgccaacatgttatatttaaggaaggagagatagttaggaaagggagagcaaagtgtatagccaaatcgaaacgattccaacaggagggcgggcaagaaacaggccagctggagggagcgaatgaacattacaattgcagacatcgccaaaatcgcaggggtagccaaaagtacggtatctcgctatttaaatggtggttcggtcagcgatacgacaaggcttaaaattgaacaagtaatcaaggaaacgggatacattccgaactcgttcgcacaaagcttaaaagcaaagaagacaagcatcatcggtgtgatcgtcccccggcttgattctttctcagtggcacaaactgttacgggtatggaagaagagcttagagaaaatggctaccagatgcttatcattaacacaaaccaggatttatcccgtgaaattgaggccttatatgacttagcaaggcaaaaaatatcagggatcgtcctattggctactcaaattaccgattttcatttggcggccattaaggagatcggaattcctgttatttttcacggccagcagcatccggacgtccacagtattatttacaatgattatgcagcagggtacgagatcggtcgctacattttgtctaaagggcataatcgtatcgcctatttaggtgtaacggaacaggacgtagcggtaggcgttgagcggaagtgcggcttccaaaaagcgctgaaggagcaaagcggcgccacggctcagttttatgagagcggctttaaggttgcggctgcggtagaagcggcttcaacgattttggacggttctgggcagcgtccaaccgccattgtgtgcgccacggacagtattgcactcggcgttatgaaggcggcccatatgaaagaatggcgaattccagaagatctttcagtaacgggcattggtgggtatgacgtgacggaagtgatacacccaggactcacgacggtgaaatatcaatatgcggcaggcgggcgtttggccgcacggcatattataaaacttgttcacgatgagcgtgttgaccgccttacagtcctgcaatgtgaattaatagagcgtgaaagcgttgacaacaagagtatacatcgattatattaattacggaaccggttccgaagaggtacagaggctttggaactgtgttcattattttttcaccttattggaaccggttcctaaaaaacgacaaaatagatcagcaagggagaagaaggatggacagagaacagaaataccgccgcctagaacaggcttctcctgaagaaatcgctgctttgcaaaagcaggtgaaggaaagcgagtggaggcaaacctatcacattcagcctgttaccggcttgctaaacgaccctaacggttttgcttattttgcaggagagtatcatcttttttatcagtggtttcctcttggaacgtaccatgggctcaagtactggtaccatacggcctcaaaagaccttgtccattggcgcaatgtcgggaaagcgatcgcgcctgatacgtcttttgactcccatggcgtttactcaggaagtggcatcgtcaaagactcacaattgcatttaatgtatacagggaatgctagggacgagaattggaacaggcaaacgtcccaatgcatcgctgtaatggatgaaaatcgagctgtttcaaaatgggagaagcctgtcattgatcaagttccagcaggatatacagcccattttcgtgatccgaaagtgtggaaggacgacgatatgtatcgctgcgtcatcggcactcagcggaatgacttcacaggcactgccgtcgtgtatgagtcgcctgatttgttggaatggcgattcgttggggagatgggcaccaacctgaatgatttcggctatatgtgggaatgcccagattatttcgagctggacggacaaggtgttttcttgttttgtccccaaggcttagcccctgaaggcgatcgctttttgaacctgtatcagtcgggctacgtcactggcaagcctttgaatcgagaaacgcttgtttttagccatggctgctttcatgagctggatagagggtttgatttttatgcgccacaaacgatgaaagatatgcaagggcggagaattatggtcgcttggatggggcagccggagattggctatccaacagactcccacggttgggcacattgtttaactttgccgagaacattggagttatgcgacggcaaattgctacagaagccagtagtagaactacagaagctgagacaaaagcgaagcgacgtacaggatacgttaacgaatgaagcaaaaacgtatgatggcattgccggcgccgcttttgagatgatctgtacatttgagccaatcgaggccgaagccgtcggaattgaaatccgctccagtgaaaaagagcgtaccgttattacttataataccgttatgcagaaggtaacaatggatcgttcaatggcaggagaaataatcaacagcagctacggggcgactcggtcctgcaggctagtggcagaacagattcaatttcacgtgtttgtcgacacctcttcagtcgaattgtttatcaacgacggcgaagaagtgtttacaagccggatttttccacagcccgacagcaagggaatccgttttttcgtaaacaaaggcaatgcccacttaaaagctaccaagtgggatttgactcatgcgggaaacgatatagaagggaatgaatgatatgggagtagacaatcgggaaattgccaagcaggtcattgaagccgtcggcggcagagacaacattgcttcctttgcccattgtgcgacacggcttcgcattatggtccacgatcaacagaagatcgacgagaaaaaagtagaaaatatcgccaaagtgaaaggcgcgtttttcaactctggccagtaccagattatttttggaaccggcactgtcaaccaagtctttgaagcgattgagagcttaggcgtggaaggcacaagcaaagaccaactaaaatcagaagcaaaaaagacgggcaatgtatttcaacgagcgatccgcacttttggcgatgtctttgtaccgattattccagtattggtggcaacaggattgttcatgggcctccgcggcctgctcacacaagaaacggtgctagcttggtttggcatgacgcctgccgatatttcggccaattttctcatgttcacagaaatattaacagacacggcgttcgcatttttgcctgccttggtagcctggtcggcctttagagtttttggaggcagtccggtgctcggtattgttctcggattgatgctcgtaaacccggcactaccgaatgcctacagtgttgccaacggctccgaggaagcgcttgttatgtttggtttcatacctgtggtcggctatcaaggttcggttttgcctgcattctttatcgggcttattggcgcaaagtttgagcgctttttgagaaagcggattcctgaagcaatcgatttgatcgtaacgccgtttttaacattgctggtcatgattacactcggtctgtttgccattggcccgatttttcattcgtttgaagaagtcgtcctaaacgcgacaacctatttgctgggtctgccgttcggggtcgctgggctcctaatcggtttcttcaatcaaattattgtggttacaggtgttcatcatatctttaactttttggaaatccaacttctcgaacaaacgggaagcaatccattcaacgcgatcgtcacagccgcaatagcggcacaaggcgcagcctgtcttgccgtcggcctgaaaacgaaaaacaacaaattaaaggcgctttccttgccttcttcgttctcggcctttctcggcatcacagagccggctatattcggcgtaaacttgcggtatgtaaagccgttcgtcatgggcttaatcggcggaggcgttgggggctttatggcttcaatattccagctaagtgcaacggggatggccatcacagtcattccaggcacgctattgtatttgaatagccagcttccactctatattttgtgcaacgtaacagcgatcgtcattgccttcgtgctcacttggctgtttggctttaacgataagatgctgagcgacaaaaaataataggctaaacaaaacggattgcggatgcaatccgttttactttccgatttttacttagccgtgaagcaataaagaagctaaaaaagctatggaaaaggaggctggatccgtatatgctaaaatgaaagaaactggaggtgtcgttttttgctagagttgtccattcatgaaccagtgagattgcgcaaggtgtgccacgcgttgtcgacggatgtccgcgtccgcatggttgaactactaagcaaggaaacgtatagtgtgcatgagttagccaccctcatcggcatcccgatttctacagcggcttccaacgtgaacgtcctacaagatgcagggctcattttaaccgaactgcgcccagctagccgcggtgccatgaaagtgtgtacacgcaactttgatgacatccatattgccttaaatgatggtggccaaaggactgaaaagcgcacatacgaaatcaatatgccaattgggcactatgttgacttttctgttacgccgacatgcggcatggcaaacagcgatggcgtcgttttaaatgaagacgatcctgtccaattttaccatccagaccgttcaactgcacaaatgatatggacgaggactggcttttttgagtataaatttccgtttgccctaaaacctaaacagaaaatagccagcttgctgttttcctgtgagttgtgttcagaagcgcctaactatgatcatgactggccgtctgacattaccgtttggataaatggcgttgatattggcacatggacaagcccaggagactttggcgaccgtccaggtaagcaaaacccgccaacttggtttcacaatacgagaacacaatatggcgcccttaaaacgtggacggtgacgaaaaaacaagcgttgcttgaccatttgcctattaatccagtcacgattgccgacttgcaactagaggatcatccttgcattacggttcgtatcggcattaaggaaaatgcgctccataaaggcggcatcaatttatttggaaaagagtttggcgatcatccccaagacttgaaattagtcattgaatttgacgagtagaggccggacaaaattagccaagaagtggaaagaaaagaagtacgctcatccgatgagcgtacttcttttttctcgtgtaactgaagtgatgacctagccttcctgttgatgctcttaagggttattagaccaaagtccggcatgctttagaacgacacgaggatgaagcttgagttgagcgaccatgaagtctgctaaatcctctggttgcatgactttatcgggattgccatccgttaagttcaaatccttcgccatatctgttgctactgtacttggtgtgagagtggtcacacgaatattttttttgcgaacttccatcattagtgattcactaaggccaatcactgctgctttagaggctgtataggcactcgtaaccggcgcacctttttgacctgcagttgaggaaatgttaatgatgtcacctgaatttcgctcgatcatttcaggtaatactgcacgcgtagtgtaatacacccctttcacattcacatcgataatatcggtccattcttctggagttaaatccataaatccgccaaactttgaaatacccgcgttgtttacgaggatatcgatggccccaagctcctcacgaatcgctgctactgctgcagaaatagaagataaattggcaacatcggctgttgcgagcgctgttttcacgtcgtattgtgccaaatcgttttgagccttctgaaggttttctagcgtacggccaacaagaccaacatggactccttctttcgcaaaagcctcggctgtagcgcggccaattccacgtcccgcgcctgtaataagcgccacttttcctttgattgattgcattctgccacttccttttttaatatggtcaatctgtattttatcgaaaagcaaagtcggatgcgagctatccgtttttcgaatgggcgataaacctccaaaataaaaaccaatgaatgcgtttacataaaaagcgtttcatgttagactaacgaacatgtaatattcattactatttaaaattaaaaagtaatattttatactgaaaggagctgattatatgggtacagccgtttgggcgctaatatcattcattgccattgttttgttctgggctatttttactaagcgaaatattggagaagccatgatacttggcttcgtcgttaccctagttttttcaggaagtcaagcatttgagctatttcttcctagcttaatgaaagggctcacacactcggtcgtttttgcatctctggcgtttattttcatggctcaattgattaattacacgggattaattggaagaatcattcaaattttgaactccctgattggtcgattgccaggtggagcagcgtacgtcaatacgtttggatcagggctttttgctctagttgctggatctggatctggtattgctgcgacaactggttcgattacaataccgtggatggagcgttctggctggaggaaagagcatgcggcatcgatcgtagctggaaactcaggctttggtagtattattcctcctaactccaccatgtttattatgttaggatttacccccgttgccgcaaccgttgggcaaggtgatttatttatcgctttatatatagccggtctatatgcattgattcatcgggttgtcgttgtgtttattatgacgaagaaatacaacatacagtctgtgcatcctaatttaattcagccaataggtaaatcgttctcagaaggctggacatctttactcatttttttagggattatcctgccgttaattattcattttggtccgcttgctaaatggtatgcttccgttgaaagtgttggggagacggcgatgaatgccatgtcgttcattgtttgggttccagtatttatgatcgtttttacattaatagtaggtcgaaatcacttgcctaaaggaaagagccaatgggtaaagttttttgaagacacggcaccatcctattacgtaattggccctgttttaatttttacatttgcgacaagtgcggttttaaatgaaattggtttaacggaacaattgcaaacgttaatgatgtcatttgctgtaccaaaatggctcatgatcgctatcgttggcatcattattacgttagttgcgactccccttgctacatcagcaacgattgccacaattggtctcgcctcgtttggcgcgttaacggcggtcggtgtggatccactgttggccgttgttaccatcatgatgtttggtgcgacagaaggaagtacgccaacttcaggccccatttatgtagcaacaggtatggcaagggtgggaccggaaaaaacgtatgtccccttgctaatttattacacgattccattaatgattatcagctggttaatcggtatgggtattatccctataccattgtaggaggggtatgatgagaaaaataattctaatgatttttattatgtcagtctttttatttacattgcttggtgctgtgttagtgtttgggcaaatgattggtctatttgcattaaaaggaagttgggttgtagggttagacgagcatctagctagcattgtttattttatgacatcgattgcagcgttttctggatatttgctttcttactttaaaaaacctaaacgaaaggaaggggagagttaacatgggaaatatagagaaaaatcaggcgccagaagtgctgcctgatgactgggtaaagagagccaaaaaattaagcacaaccttaataagtgatggcatggatattccggttgaaatgaaccacttaattaaaccattcaacattgatcgtgttttagtaggttcagctgtaaccattgaggttgaagacggcgacaatcttgccgtgcatcatgctatttatcattctcgaccaggccatgtgttagttgttagtgcaaatggaaatgaaaaaagagcggttattggagaacttatggtggctgcagcagatgctctacagctcaatggctttattattgatggactgattcgagacgttcagacgctgtctacttcttctttccctgtatttggccgtggtgcgataccagctggcccaaccaaaaacgggccaggcgtcataaaccaaccaataaactgtggagggttaaaggttgagccaggagactttgttatgggtgatgcggacggcgtcattgtgttaccaagggccaatgtagaaaacgcgcttcaattagcagaggaaaaagcgaaatatgaaaaggcgcgactagaaagtatagctaatggaaatatcaaaccaaagtggctagagtagataagttggcgcggatgaaactgtgattacgctgaactctttgcaaggataatagacactctaagcgaagttagatatgctttttagagactttattattctttaggagttggcctaaacatgaaaaatcctttggaagtattaaaagagagtgctggttcgctaccgagatctcaaaagctagtcgttgactatatgattgatcattattcggaagttgggtttatgacagttggccagttatccaacaatgtcggaacaagtacaacaacggtgatgcgtctgatgtctaacataggttattcaggctattcggcctttcaaaagagcctacaagctcatttaaaggaagaggctgccccacaaattagattagaaaaaaacttgaaaaatctttctcataatgaaagttggttgcatcattatgagctgcaactggaacaaatccaaaaagcaaaccaattgaatgttgaaaccaaccttaatgaagcggtcaaattgatctgttcggcttcacaaatctattgtacaagtgttcgaagcggattgccggtagcgcaatatttaactcacaatttaaatagaatgctaggaaatacaaagttaacacttgcagactcaagtgactgggtggacgatgtcatttcctttacggagaacgatctactgattgttgtgagctatgctagatatggagaacgtctactccattacgctgagcaagctaagaaaaaaggggcaagcgtccttgccataacggataaattttcttcgcctttaagttcatacgcagacctagtttttgcctgtccagctgatagcatagcctctcacaactcaatcgtttcttctatatttatagtggattacctgatcggttccctttctcttgagaagaccgaatacatttccaaacgcttaaaggaagtagatagcatactgacccaaatgaactatcatgttcaaaagaaaatagataaataaggtctttaacgtagaaaggtgataataatgaaggtaggttttttaggctttggagaagcagcctatgaattatccaatggtttaagaaaagaggggctcaagcatattaaggcatatgacgttatgattagccataagacggcgggcgccctaataaaaaaacgtgcagaggaagcggatgttcaactagtggcgagtgttagagagcttattacagatatggatgttctctttgtggctgtaccggccagcaaggcgctggaggtcagtttaaatattcggtctgaattaaaaggagagtctttcctttatgtagacgtatctgcctccaacccttccataaaacaagagattgaaaaggagttagaaaaagtaaacatcccttttgttgatgcggctatgctaggtcccttaccggtgtataaacacaaagtccctatctctgcgagtggtaacggcatccaggagtttatcgacaaaatgacaccttaccatatgaatatctctgaagttggaagtaaggcgggggatgcttccgccattaagttaattagaagtatatttatgaaagggattgtcggtctctatttggagacattacaagcttctgaaacgtacaatgtgtctcaagaagtactcagctcgttagctgaaacgatggatagccataactttatggatacattaaatcgccttgtgactagtagtgccattcatgccgaaagaagagcgtatgaacttcagaactccgttgacatgcttaaggaagtcggaatcaattcagatttaaccaaggcggctaaagaaaaactggtcgaactctccgagatggctgctgttcatctgcaaggggagaagcctgcgaattggaaagacgttttaaactattaccgtgcctaaaacaggctttcattttttataaactcaatgaagacgccctcgtccaattcaaccacccattcaaacctataaatcatacccgaagaaagccgcccatcagggcggctttctttaccgaaaaatattgacaatgaagatagggaagcgtatgatctacctaaacaaaaaatatgtttgtaaacatattttttgatattaaatgctgcgattggttgaaagcgctttatttaactggagataaaaacccgaaaggagtgctggcaaatggcatgggcagacaaagcatttccgcgtccaaaactcgtgcgcacacactggatcgatttaaatggctcatgggattttgaatttgatgaccaaaacaagggtgtcttcgaaaagtggcagttgaagagcgcattttcccagaagattcgtgtgcctttttcttatgaatcgccggaaagcggcattggcgagactgcctttcaccctgtggtatggtacagccgaaacatcaccattccaactgaacaaaaaggcaaacgtgttctgcttcatttccaagcagttgattatcgagcaactgtatgggtcaatgggcaagttgcaggtgaacatgttggcgggaatactgcgttttcttttgatataacaccgtatgtgaaacaaggggaaacacaacagattgttgtcagggcagaagacagcgaaagcacatcccaaccacgagggaagcaacggtggaccgacgaaaatttcggctgctggtatgtacaaacgaccgggatatggaaaagcgtatggctggagtttgtcgctgatacttatttaaaaaacgttgcaattacaccggattttgacaaacatgccgttcagtttgattatgaactaaatacggccaatgttaaggggctgcaaatcgaaaccgtcgtttctttccgaggaaaagaagtgcgccgcctgtctttttctcctgaaagctgcaacttgaaactaacagttgatttagacgctgacatccatgaatggaaagtggcccattggacgccagaacatcctcacttatacgatgtggcgtttactgtttatcaagacggagtagcggtagatgaagctttttcttacttcggtttgcggaaaatttcgacgaaaaatggccaagtgcttttaaacaatcgccccatctatcagaaattgattctagaccaaggctattggccacatacgcacttgacagcgccatcgttagaagcgcttgaacaagatattgacgcaattattgcgatggggtttaatggcgtgcgcaaacatcaaaaaattgaagacgaacggttttatgctttatgtgaccagaaaggtttgctcgtttgggcagagatgccatctgcttataccttctcccgagaagcagtgggcgcttttacgagcgaatggcaggaagtcgtatgccagcttgcccattacccatccattatcgcctgggtcccctttaatgagtcgtggggcatcaaagacgtgttaaaaagcaaacaacaacaagcattgactgaagcgatttaccatttgacaaagtcgatagatgagacgcgccttgttattgcaaatgacggttgggagcataccatttctgatttaatcacgcttcacgactatgaagagtttgctgaagcgtttctggcaagatatgaggacaaagacgcgctcttaagcaaccattaccctcataatcatgacaagtatccattcgccgaaggctaccactataatggccagcctgttttaatcagtgaatatggcggcattgcttttaagtcggaagacggctgggggtacggcaaccaagtcgcaacgaaacaagcgtttctgcagcgctatgaagcgattaccgatgcgataaaagcacttccttatgtatccggtttttgctatacgcaaattacagacgttcagcaagaaatcaacgggttgcttgatgacaaccgaaagccgaaattggatttaaccgacataaaagcggtgaatgacaaaatgtaaaaacatgtggaaggaagacgaacgaagcaaagtcaacatcgcaaccatagaaaagaagctggtttttctattaagaaagccagcttcttttctttttagcgccgatacacgactttaaactgttcgcataaaaccggaattttagggtggaaggcaagcccgtgagtttcaagctcctgcgtaaaaaacggttcgtgcacatcttgccaataagcaagggagcggtctccttctccttccaaaaaagcatgttcttctgtcacttgattgtaaggaatgaccgtgacagccgttgtcatgatcacagcgacagcttcccctttgccgttaagcaggacatgatgctgaccaacttttggcagcgattcttgctccaattcatacagcgtgtaattggaagaagtagctgttttcttcccggctagtacgagttcagctagctcatcggccatttcttccgtattgccgaatgcccaagcttcatagtgatctggcacattttgagaacggcttttaaacgattgccacaatgctgcagctgaacgatcttccataatgatccctgctttcttcttctaggtgtgaatacggattaaggtgtgagtggctcttcttggccagcgattttgaacagcgcatacaaatcggccttgttttcgagaaaatcagctagtgaatattggtcaaggacctggaagaaggcatgctgcgctttagctagtgcttcttttaatttgcagctattcgaaattaggcagttgttgttgtcacgaaagcattcaacgagttgaacatcttccagttcgcgcactaacttgccaatattgatatcaacaggcttgtgggcaagggcaatgccgccatgcttaccgcgaatcgtgtggagcacgccttttctgccgaggtcatggatgactttttgtaggtgattcaatgaaatgttgtagactgaggcaatgtctttcacttgtgtacgttcgccatctggcaaactgccgacatagagaagtgctctcaacgcgtagtcagtgtaagtcgttaattgaatggccatcactctccttttcacacactattagaatagcatatttccgtaaaagggcaggattttttgagaatggtagcaataatcaaattcttttttgctccattcgtatacaagaaggaagacggtcctataaggaataactaaacaatagactattgccaaagccatccacattacgtaggctgaaagttaaaaactttaaagcgagggagatgtatatccgaatgacgtgtttattttgtgccattgccaataaggaagtaaaaagtcatattgtgtatgaagacgaacaagctatcgcttttctagatattcagccaatcaacccaggacatatgcttgtcattccaaaaaggcaccaggaagcactccatacgctgggagaacaggaatatatcgatgtcatgaaagcagttaggcgcttaagcaaacaggtggatgatacgctccgacctaagaaagtcggcgttgccattgccggttttgaccaagcccatcttcatgttcatattgtcccgatgcacgcgtaccacgacttaacgccgagcaagtatcttgacaaaagcattgctgttgcgaaggaagaagagcttatagcgatgaaacagctgttaactatgaacaaataggcagttctcgaccgatttaattgtaaaaaggcttgccgatttctgtcgaagccgttatattgttattgagaatgaaaattgttatcaacaaaaggagcagaatagatatgaaaaagaggcatgtatttgtcgctgccagcgcgtttatgttattagcggcatgtaatagcagcaacgaggggaacggacaagaaaatacatcaaaagacggcaatagtgacacaggttccatcacggttacggacacacaaggagagcaaacgtttacagaaccggctaagcgtgtcgtcgcccttgactggacgtatgtagaaaatttattggcccttggtgtccagccagttggagtggctgacgtcgaaaattaccataaatgggtagatgtccgcgaagagctttcagacgatgtcgtcgatgtaggcttgcggacggagcctaatttggaggctattgcccaattagagccggacctcattatatcagcaaattatcgttctgaaaacattgaagaggaactgaaagacattgcgccaatgctcatctttgatccttatcctgaagaaagcaaaggcattacccattacgaagaaatggaaacgacattccgcgaaatggcaaaagtggtagacaaagaggcggaaggggaagccatactggctgaactcgatgaaaaatatgaagaaggcaaggaaaaaatcgagtctatggatctcgagacgagagatttcgtgttgacgatggcttataccgataaccaagcgcctgtgttccgcttattcaatccgaatggaatggcgccagcaattttagagaagattggcttaaacaatgcctatgattcaggaagctttgagttgtacgggtacgctacgacgggggtagaggagctgctttcagtcgaggacgcaaacttccttcatatcgtccaagacgatgatggcttatttgaggaagggctggcaaacaatgcagtatggaatgacttgaatttcgtaaaggagggccgggtttatgcccttggcggtgacacgtggccgtacggtggtcctctgtcggcaatgacgttgattgaccgcaccgttgaagcattagaccagtaagcatgaatgaacaaggcaagagcgttttttattctttttttcttttaataataggcctttctttgttgttggtgatttccggccttcatttaacgcaaggacaagcaccgtttacactaaaggagcttgtgcttggtttatgggaaggagatgaccgtattcaaagcgtcgtttttggcatccgcatgccaagggtcgctgtcggtttattggctggcggcgctttggcaatggccggcttggtcctgcaaacgctgacgaaaaacccacttgcttcggcggggacgcttggcattaatgctggtgcctattttatggtcgtagctgcagctgttttttttccaggcttaaacagttcgtacccatttattgcgtcttttctcggctctgcattcgcagcgcttcttgtcttctcacttgctggacgggcaatggatcccgtccgcgttgctctgacggggatgattgtctctcttttgtttgcggctgtgacgagcgggttgcagcttatgtttgagcaagagacaaacggcttgtttttgtggggggcaggcacattgatccagaatgactggtctggattccggtttgcactcccgttcatcgtttgtgccggcttgcttttgcttttattaggaaaacaatttgacttattgcttttaggggaagaggctgctgctggcctaggtgcatctatccagcggatcaaagcagctggatggctgttggccatcatgttggcggctgcgacagtaagcgtcgctggaccaattggcttcattggcttaatggcgccacacattgtccggatgctcggcattcgcggccatctgcagcagctcatccatgcctttgtgtggggcgcctttttgctcatcgctgcagatgtactggctcggttcattcagccgggaagtgaaatccctgttggcgcgatcactgctttaataggcggaccgtggctgatgtacttagcttaccggacaggaaaacgctataaagggcagaatcagacgctgcgtgggaatcgaagcaagctgtcgtttccttggttgattacaagtatggtggcagctttgctcgtggtggcgatcggtgcacttgcgttcggcggcggtagcttttacagttttccggaaatggtatcaggagcccttttcgatacagtcacggtgcagttccgttggccgcgggtgcttgttgcctttctcgttggttcgttgttagccctttgcggcgttttgctgcaaagtgtgctccgcaatccacttggcgacccgtcgattttgggaattacttctggcggtggcgtcggcgccctgtctgttatagtgctgtttccgtcactatcgtttgcctgggtgcctgtaggggcagccaccggcgcgggactggcgatcgctattattctgttagcgacgaaacgatcgaattgggaacccatttctttggcgttaatgggcgtcgccgtctcagcgatggggtcaggcatcattcaaattttaactgtcaaggcaggagtcggcgttgcacctgtccttctctggttagcaggaagcacctacgggatgaattggcaggatgtctggtttctcgctttcgtgctgatcgcgctcgttcctatttcttactcgttttcccgtcaacttgacgttctcgccttaaaccaagaagtatcggttacgcttggcttgcgtattcagcttgtccgtgtcctcgtcttgcttttggccgttggcgctggagcagccgcggtggccgtagcaggggcgattagttttattggccttcttgctccacacgctgctaggggaatcgttggcgtcaaaacccgtttcgttgtccctgtttccatgttgctaggcggcattctccttgtgacagctgatttgctaggcaggcttgtcctttatccgaaagacattccgtctggtttgctcgttgcgatcatcggcgcaccttatctgttatatattatgaaaaaattgtaggtagttaaagttggctaaaaagggatcagcccgtcttggtaaccaggcgggctgatcccttgttatttacggaaaggcttctttatcctgatcgttaacaacaagcaacttgctcaacgttttggctgcttgtttttcaccttccctcacggaagacaccaacaaagttgtcattctttctcacatatcctatcactgttgggacagcaatctttagatcaattagttgtattaaacaagggaacacttaaaagattagctgttatgaacaatgactatttaaatagcgttgttataattcaatttgaatcaactccgttattgtcggctggtgcatagaaatgaaaatagattggaacgaggcgaaaagtcgaaataaactgaacaaggaagaggggatctagttgagtttagtgataaaacaagtcaataaatcgtaccaatcaaatgaagcaacaaagcatgtcttaaaaaacgtaagctttagtgcaggagaaaatgaatttgtgtgcatactcggccatagcggttgcggcaagtcgacattgcttaatttgattgcagggttttctagccaagacgagggaatcattgaagtaaacggaaagccaattgaaggtccgagtaaggaacggggcgtggtttttcaagaacatgctttatttccttggtataccgtgattgaaaacattgcacttggaccgattttgggaggacaacctaaggctaaagctttggaaatggctttcgaatatttagtgcttgtcgggttagcagaatgtgcagatcaatacccaagccaactgtcaggcgggatgaaacaaagggttgggattgcgcgggcattagcgaataaaccccgtattctattaatggatgaaccgtttggagcgcttgatattttgacaagagagacaatgagaaaagagttgttatcgatttggatgcagcttcagacgacggttctttttgttacacatagtatttcagaagctgtccatttagctgaccgaattttagtaatgaaagatggggagattaaggcgaatattgaagtcccattaagccggccaagagatgaggaaagcaccacgtttttaaggatggccaaagatatgcaagccttgttgtcggcagataatcagaaattgaaggcattaggaggatgaatcgatgtcagcaatgggaagtccgaatatgcagtcagcgaccatgaatcataaaggcatcgcaaaaagaaagcactggctcgatcaagatcgtttgtttcgtggtatgacggttattggtttctttctattatggcaagttgtagggatgttaaatgtccaaatggagtggatgaatccggcgtttttgccaacgccagtgaatgttcttgaggcagtcttacatctccacaaccaaggtgtgttattcactcatatctggtccagcacgtggcggttgctattaggttttgcacttggggttgtacttgcggttatgctcgcttttatgattgtaaaatttaagcttgtacaaaatatagtcgagccattcctaaatatggttggcccaatccctccatttgcgctgttaccgatttttattatttggatgggagttggagaactgccaaaattgacgttaattacatatgcaaccgctattccaatgattgcttatactgttgacggcatccgcaatgtcaatccgcttttgattcgttcggcgctatcgcttggtgcgaaccaatggcaagtgtttaaaaaagtcattttgcctgcctcgctaccgccaatattcgtaggcatgcgtgtcacattggccatttctttttcagcgatggtcgtagctgaaatgattggttcgtattcagggttaggctatttgattattgattcgagaaacttttttcaaatggataatatgtttttggcggcagctttaattggtgtgctttattcgatctttgcttttattctcgggcaaatggaaaagcggttgtttaagtggaagcaaggcacacaaatcaatgatgcagtaacgaaaacgaggtaaatgagtgatggaagagtgggggaatcgagaatgttgaaaaaggcaaagcgggtatccaatggtgcaggcatagcgctcgtaacggcagcgctattaagtgcttgtgggaatgggaatgaaccagctggtgtgggcacaaatgaatccagtgacttagaaacaacagatataacgttgtacggcgttgtcgatacacaagtctccgcacaacagattgttgcagataaaatgggtttttttgaagatgaaggattaaatgtaacaaatcaaattgttcaatccggaccagacattggccctctaattgctagcggggatgcgcaagcaagctttgaaacaaccattacgaatattacattaaaggcttccaatgtagacaatgttattgttgctccaatggcgaatatttctggtacacaggcggtgattgcccaccccgattttgaagtgggcagtgcaaaagatttagaaggggcgacaatagggatggtccaaggggcgggcgtaacgattgccctgcaaaacatggctgatgaacttggtgttgatttagatacggtgaactttattaacatgtcgcctacggatcaaattgccgcgctggacaatgggaacattgatttaatggcagcttgggagccgtggattacaacaggagtagaacaaggagcaacgtttttatttagcggaaacgtttcagaacttcctggagcagaaggggaagttgattggatgcagtattattcgacgttccaggtgacagaagagtttttagaggaaaacccgaataccgtcaaagcccttttgcgcgctcttttgcgagcaacagaatatatcaatgaagatcgagaaggcgcgttagacatcatggatgaagcaatacagcatttgccacgggaacaaattgccgagatcatggagcgcaacgagtattccatggatgtaactgaagacctaaaagaaggttccgacgtgattggcgaacatttattgaatatggacagtattaaccaacagccagagtttgaacaatatacgaactttagcttgcttgaagaagtattagctgaataaggaaagcccacgcggacggataccttcctctagcgtgggctttttctaaaaaaagctgcagcacccatcagtctatagctcatgccgatgtgcagcactctcacagttaggtctagcgtttaagagaaaataaaaagaaacaaaatggaaagcgtttgcgtgatgatgtgcaaacaacaatgatctgttcggccgttgccccatgctgaaaaagctgatttaatctgtgaaaaaaccttacacattttaggtaggatctacgaatcggtgattccacgaaaaacgccaatgaaaggatcgctgtgcggttttattgttccacactagacatcgaaataccccccttttccaacaaaatgatagttaacgatagattatttagttaatttaaacaatgacgcacgccagtaaaaacactactattgcctataacaacagcaaatgcgacatagtcttgcataacaaaagggggcgttttgtttggatcgacgagaaaaagaactagttgcctttgaccgagttggcaaaatgtacaataacggtacggttgctttacattcgtttaatctccagattagaaaaggagaatttgtcacttttttagggccgtccggttgcggaaaatctacagcattgcggatggcggcagggctttccgaaccaacggatggagaagtaacggtgtttggccagtcgccaaaacaaacaatcaaagagaccactaacgtcgcttttgttttccaagagccaacgttgctgccgtggcgtaaagtcattgacaacgtcgtgttgcctcttgaactgaaaggcgtgagtaaaaaagaagcgcgcagcgaagcacagcgcgtgctagagatggtcgggctaaccaaacacctttattcgtatccgcggcaattgtccggcggcatgcaaatgcgtgtatcgattgcccgggcattggcagcaaaaccgaaattgttattgatggatgagccatttgccgctcttgatgaaatcactaggcaaaaattgcaagtcgagttattggaaatttggaaaaaagaagccgcgacgattttgttcgtcacacacaatgtgtttgaagctgtctttttgtctacgaaaatagctgtgctttcaagcagcccaggacggcttacagaagtgattgatgtcaacttgccaagccctcggaggttggaagatcggacctcagaaatctataacgattatgttgaacaagcgagtaaggcacttgaagaaggttcgaacaaacagaaggagggagcctaatgccaacaacgacgatccagcaggcaaaaaagccagttgtttctaagcgctccccgcagcgaaagcctcaattggcaagcaatcgttttacccgctattttttaggtccaattatagcctttatcgtgtttgtttctacctggcagctgattccgcttatgctaggcatccctcactatattttgccaaagccgacagacgttgtcgcctctgcggcgagtcagtggccactattgtctgaggcagtcagcgtcactgtcgtcgtttctgctattggttttttgcttagtgctgtgattggcgtaggcatttcgatcttgctggcaagctcaaaagtgattgagcgcagcatttacccatacgcaattattttgcagacgttgcctgtggtagctattgcccccattattgtcatttggtttggagctggttttaatgcgattgtcgttgtctcgtttttaattggtttctttccaattgtttcaaataccctcatgggccttaattcggtcaataagcaaatggacgagctattttctctttataacgcgtcaaaatggcagaaaatgtggaggcttcgtgtaccggcagcactgccgtttatgatggcgggtttgaaaatctctgctactttatcgattgtcggcgccattgtcggcgaatacgtcgctggcgtcggcggagggaaaggaggaattggctacgcgataacggtggcagccattcaagtgaacacgtcctttatttttgcactggccatttgcggcgctattcttggcataggtttttatttggcaatgagccttttgtcgaaagtagtccttggttcgtggcatgaatcttccatcaaacaagacctttaaagaaagcagggaaatcaacatggaaaatcgacaaaaacgttaccggttgctggctttgtcgcttttaggggcagcggttttgagcggctgtggcggtgaggcgacaggagatgggccaaaagaagtgaagctagtcttaaactggtttccaaaagcgcagatgggcggtttctttgctgctcagtcacaagcgtattacgaagacaacggccttgacgttgacattgaaccaggtggccctgaagtctcggctattcaaatggtggcggcaggccaagccgagtttggcttagcccatgctgaccaaatcttaatcgcaaggaaccaaggcattgagctagtagcgctagcggcgagcttgcaggaaagcccgcaagcactcatgttccatgaagggcatgggacggacagctttgccgacatcaacggtcggaccgcttatattgagccagggattccatattgggattatttaaaatcacaatatgacttaagcgacgtgaccgaacttgcttacaatggccaacatgttaattttcttgaaaatgaagaagcggtgacacaagcgtttttaacgtcagaaccgttttttcttgaacgggaaggaattggcacagagacgttattgatttcagaggctggctacaatccatataatgtcgttttatttgtcactaaagactatttagatagcaacaaggaaacggttgagcgctttatggaagcgtacacggctggctgggactattacaaggaccatgatgaggaagtgaacgaagtcatccatgaggcgaacgaaaacatcgctttagaagaacttgcgtatgaagcagaaacgcaattcgaatttgtctttgggggcgatgcaaaggagaatggagtcgggtttatgacagaagaacgttggggagatttgatccaccagctcgtcgaaatcggtcaattgcaggaaacagtcgatccaaatgaagttttcacgactgagtttttgcagcactagattagacggggagaagatctaacaactccatttgcaaataggccgtgaatggttaaactgattggaatcagaatccaaaaaaggggggatggtggcggtgttgttcgccggtcttctctttttcgtacagtgaagggggtgcagataaatggaaaatatgcatgacatcatcagtcggctagataagacgaaccaacgaacaatgctggcaacgattatcgctgttgatggctctgcttaccgcaaagaagggacaacgatgctagtggaggaagacggcactagaaccggtcttttaagcgccggctgcctagaggaggatattagcgcccgctttgcctctgtctgggcgcaagggcctatggttgagcgctataatatgcgcgcccttgacgatgcttcctggggactagacggcagtggctgcaatggtgttgttgatgtgctattgcagccggtgaacgatacgttgctttcattcctgcgtaaaacagggcaggctctagcgagagggcaaacggtagcgcttatccgcagcgaggatgtaagccaatatctttgccagacagagtctggggaaatgtttggcgtttggaatggggagaacccacagttggcaggggttgaaaaaagcggcgttatttacagcactaacttaacgaaaaacctatacctccaagtgatacggccaaagccaaggctgtttgtgtttggcgcccaggctgacgccaagccgctcgtgcagtttgctgccaaagtcggcttcagcgtccatgtggtcgattggcgccccgctctctgtacaaaggctcattttcctgatgctgataaacgtatcatcggttttcctcatgaagtcattccaacgctttcttttaaaaaagacgatgccgtcctgcttatgacccaccactttcaacgggatcaagaaattgtatcccacttgcttgatgtccatcttgcctatttcggcatccttggttcaaaagcacgtacggctcgtttgctagcagccgctcacgtgccagagggaatccgcacaccggtcggcttgccaatccgagcggaagggcctgaagaaattgcagttagcgttgtcgccgaattgatccaaatggtaaaagcagaacaacggacacaggtgctaacatgaagacggtcgccatctgccttgctgctggccaaagtgcacgaatgggcgaaaacaaactagcgctgccccttttggaaactactgtcggcagcgccagtttaaaaacggcacttggcacagatgtcgctaaaatcgtcgtcgttatcggcgaaaaatacgggcatacaagctggctcgacccgaaactgctcgctgatcgccgtatcatgctcgtctactgccgaaaagcggcagaaggccaagcggaatcattgaaatgtggacttgaagtagctggtgccctaggcgcttctgctgtgctgatccttcttgccgaccagccgtttttgcctgcgtctgtcataaaaagcgtgttggctacagcaaaggggaggcccgatgccacgtcagtctccgcctgctataaaggcaaaaaaaggccgccagcgttatttcgccagtcgctgtttgtaaagttgcatgcccttgctggcgacgaaggtgcaagggcggttttgcgcaaggacaaaagcagcctggctgtccctgttgctgatgcgtctgcgtttttcgatattgatacaaaggaggattatcaatgggcttgccgccatttgcagaagtggaaatgaaccagtatccgcctgtgtctatgccaacgacagtcgagcaagcatgggcggaggcgcaaaagccaggctcgaccttcgtcgcgggtggaacgattgtacaaatgcggagggaacaaggatttgacatgggcaaccgctttgtttctttagagcaaatccgtcgtttgaaaacaatgatagagaccgataccgctatctatattggtgcttttgcgacgctagccgaatgtttgaatagcaagatggtcgcacaagaacagcccctgctagtgcaggcgcttgcttctattggcgctcctgcagtgcgaaatcgcgctacacttgggggcaacatcgtatacggcaaaggcgattccattccagcgctgcttgtgctggaagcgaacgtcgttttatatcacgatggattggcgacgatgccattgtcggaatggcttcagcaaaagccaaacgcccttttaacagaagtggagattggcaaatggccagacatgacgcaacgtttctggctatatgaaaaggtcgggcgccgtgaaacatttacggcatcattagtgacggttgctggcgttgcagtccttgataacgatcaaaccattaaagaactgaagttagccgtcggtggcggcgaaatggtgccgcaccgactgcttgagatggaacagcgccttatcgggaagccacttacgaatgagttgcttgccgacgtctaccagtttattaagcaaacgggcacacttgttggcacgccctttgcgacggaaacgtatttgcggatggtgctcgcaaaccggattgtctcgttcgtcgatggcttgagagggggaagaggagatggaaaaacgaacgattcgttatgatggcattcccaaagtcactggttcgctccactatttaaccgacctaacgtttagggacacgttgtatggcaaaattttgcgcagtccctacccccatgcgcgcattctctccatccatacggagaaagccaaacagttgccgggagtcaaagcggtactcacttatgcggatgtgcctgcggtcaatggctatggcatcattgttccagaccatcccgttttttgtgatacgcatgtccgttatgtaggtgacgcggtggccgctgtcgctgctgtatcggtggaagtagcaaaagcagcgttggtgttaattgaagtggagtatgaagaactccctgtacttgactctcctgagaaagcgttagaaccgcaagcaatcaagctccatccagaaggcaacattctccatgttgcccatcatcaaaaaggcgacattggccaagggttcgcggatgcggcggcgattgttgaggaaacgtatgaattgccgaggcaaatgcatgcctatatggaaacggaaggagggacagtcgttccggaagcggacgggggtataaccgtatatatgggaacacagcatgggtttaaagatcgctttcaactagcacggattttaggtataccagaacaacagattcgcattgtctcaagtccgatgggcgggtcctttggtggcaaagatgagctcaatctccaaccttacgcagctttactcgccttaaaaacagggaggccagttaaaattcaccacacgcgaatggaatcagtgcgagcagggctcaaacgccatccgatgaagatcactgtgcgcacgggcgccgaccaaatgggctgccttactgcccatcacgtggaaatcattgccgatactggcccttacacgacactggggccagccattcttgatttcgccgtagagcatgcggttggcccttaccggattccacatgtcctcgttaatggaaagtcggtgtttacgaacaacgccaatgctggtgaattccgtggttttggcggcaaccaaatgacgtttgcccttgaaggacaaatggaccgccttgctgacaagctcggaatgtgcccggtagaactgcggcgccgtaatttgcggcgtgccgatgatttaggccctttagagcagcgaattgttccgaccgatggcgcacgccttgtgttggagcgacttgcagaaacaacgatgagggaacatacgacatcgtctcgtaaacgagtcggcacaggctttgcgttaacaatgcacggcggtgggttagggtacggacgtcttgatcgcggtggaggtcggctttgcttgacaaaagaaggaaaaattgaggctgcctttggttttgaagaagccggccaaggaattttaacagtgattgaaacgatgatgcttaaagcgtttcagtgcgggcggagcgatctcgacatccaaattggtgacacaggccgtgtgccgcccacaggctcgacgacagcttctcggggcacgagcatggtatggaccgcaatcgaacgattgaaagagccttttataaaggcgttgctggaccaggcgatgcgggcaacgggaatagaggaaaagcggttgcaactcggtgcgggtggcgtttacgaacaggggacattggttatcgactataaaagcctggcccgctttagtgaaatgcctctctgtttagaaacattgtttgattttccaacttctcctgatcctacagaaggcggccactacttgtacacgtttgccgctgtaaaagcaaaagtagaagtcgatcggatcaccggccgagtccaagtactcgatttaaaacaggccgttgccgcaggccctgttgtaaatgaactcggctatagggggcaaatcgaaggcggcggcgtaatggcgctcggctatgccttgatggaagaagcgatcatggaacaaggcaagtatgcgactgaaaattttgatacgtacatgattcctagcataaaagatgtgccgtttgacatggaaacagaagcaattgagacattagagcaaggggattgctatgggccaagaggcgtaggcgaaattggcaccgttgccgttgcaccggccatcgctaaagcaatccatcaagcttgcggctgttgggtggcgaagttgccggtttcgccagaacgtttgctggaagcgatggaagagagggaggaggattcatggcattcacacgtgcaaacaaccgaaaagtaagcctgacctttcaaatcaatggccagacgaggcaagtggaaacatacgctagcgtgaggctggctgatgtgttgagagaggaactaggcttgactggcacaaaagtgtcatgcggcattggccgttgcggtgcctgcgccgtgcttatggatggaaaagtggtcaatagctgtttgctcatggcgttccaagcaacgaatgtcgagttgcaaacgattgaaggaattaccgcttctgccgaaaacggggttgaccctatgcagcaagcatttttagaagaaggtggcttccaatgcggctattgcaccccagggatggtggtcgctgctaaagcgttgctgaatgaaaaccaggccccgagtgatgaggaaatggccgaagcattgtcaggcaatttatgccgttgtactggctacgccggtattatccgagccgtgcggaaagcggcaaagggaaagcaggagagtgatgtcgaagggccgaacagtagcgcgaaaaggctgctcgaatagaaagagatcgcgctttctgaacgacagggaggcggttgcgacagtcgtatttagtcgttttacccactcgaaaaaacaggcgcagcccggttacacatcgggttggcgcctgtttttcgcaagcttttcgatttattcggcatcgtctttgcagagaggagctcggtcaaatggtgaattcgctctccccatacgggtgccaagcggctgacagcgccttggccaactcgctgtttaggccattgcggacttttctgtttgttcgtagtaggaaagcgccgcttggacggctttaccggtttcaatctttgtaccgtaatggagaagcgctgcctcaagtgctgcgagcacaaacaaaatgttttccttgcgacagctatagcccattgtgccaatccgccagattttcccatggagcggtccgaaagagctagcgatctctacgccaaaatggtgcaacataaaggcacgcacgcgatcagcgtcaagcccaacaggtacgcacacgcacgtcaccattggcaatttgtgctgatgggagacaaataactcaagccccattgctgttagaccggcaataagcgctttttcatggtaggcgtgtcgcgcaaaccggtgggggagcccttcttccagaagaatcgctaaccctttatggagagcatacaccatggaggttgcttccgtatggtggttcaaacgccttggactccagtaatcctgcagcatgccaaggtcaaaatagttgctggcgacaactgtccctcgcagtggttcgtccaagtcgtctttggttgcaattccttgttcgacttttttgcggcgggcaatcacttcttccactcgttgattgtatgtaatcggtgccatgccagccgggacggacaagcatttttgcgtgccgccgatagcggcatcaatgtgccattcatcgactaaaacgtcggttcccccaatcgtagcaaccgcatcaacaacaaacaggcaaccttgttcacggcaagctttgccgatttgagcgagtggttgcatgcatccagttgacgtttccccatggacacacgcgacaatgttaggcttgattgcgtggatgtggttgattacttcttcttcgctaaacacagtgccccacgtacattcgattttgtggacatcggccccgtaacgttcgcaaatttctacaagcaaatggccgaaacgcccgtaaatcggcacaagcacacggtctcctcgttcaattaaactggcgagaacagcctcaatccctgaacgtgacgtcccgtcaacgggataggcccactcgttttctgtttggaacaacttgcgcagttggtccatcgtctgattcatgatgttcgtaaaagcagggtcaaattgccctagaatcggcatgctcattgcctgcaagacacgggggtcgacttctaccggccctggcgtcataatcgtccgctttgctgaaaggtacgtatccattgcaattctccttcaaaaacattttgcagctttaaactaataggcaagcttatacaaaagggcggcaagtgcagatacgccagcttccaaatcttcatcggctgtaaactccaatggggagtggctaatgccgcctttgctagggacaaacaacagtgccgttgggcagcaattgccgaaaatttgcgtatcatgcccggcgccgctgtacatgtattggactggaagccctgttttttgcgcagactggaaggccagtgctgtaaggtctgcgtccatcgctactggagcgacgtctgcccactggtccacagagatgcctaactggctcgcttgctcttgttcatggaagaacgtctccatttcctcacagtagcgatcgagcatgttcgtggaatggtggcggatatcaagagaaaagctcactttgccagggatgacattggctgtatttgggaaggcttcaatttgcccaacggtggcgacaaacgcctcgtcgattttccttgctttgtctactaagcgggtaattaagcgcgaagctagttccatcgcatctttgcgcatgtgcatcggcgttgtgccagcatggttggcagcgccttccactgttaccgtgaaacgcctttgaccgacaatagccttggcaatgccaattttgttgccgctatgttccaacacttgcccttgttcaatatgcaattcaatgaaacagtctatgtctgtgcggcggggcgcttgataatggccctggccaaatccgtttgcgcgcattgcctcgcctaaactaatgcctgatgcgtcaaggagtccatctatgtccgcttgctcatagcgtcctgtaatactgccggacccccaaaaagcaagggggaagcggctgccttcttcctcgcaaagagagacgacatcaatcgtttttttagggcggccatagcgggacacaaggcgtgagacagcaagcaagctgccgataatgccataagctccatcaaatttgccgccgctggaaaccgtgtcaatatgggagccagtgacgattgaggcttgcgaagcaagcgttccttcgatccgcccataagcattgccgacatcgtcaaagaaagcatcgagcccctttgcttgaaataaagagaaaacggcctgttgggcttccagccaggttggtgtataaagaaggcgtgtattcccgccgtcgctcgttttgccaaagcgagcaagatagtgaatataggcgctagcttgctctgtttccaagctgttgatcatcgcaaatcgtacccctcgctttattttttatgtcagaaatgttccgaatacttctgtgtgtgactgattttactggtaagcttacgataaatcattggcaaatctattattttttacggcgaaatttgtgcaatttgcctaactaattgaaacattagaggaggagattcagttgaacatttcccaattattaacgctgcctgccttttctggcgcgcggctcgtggcaggaaaagcgggggcagagcgcagtattgaacatgtcaatatgatggatgcccctgatatagctggctatttaaagggcaacgatttgcttgtaacgacggcttaccattttaaagatgacgcaagccaattagttgaactaattgaaacgatggccgaaaaacgttgcgccggtttggggattaaagcgaagcgctttctcggaaaaatacctgaagaagcggtggccattgccaatgcccatgggttgcctattattgaactgtcagaagaaatagggctagggacaattgtgaatcaaacgttaagcgcgattcttgatttgcgcaccaatgaactaaaagcggcaattgaagcccatcaaacgttctctgaccatatcgttagtggaaaaggggttggtgaactgttagaaaatgtagcaaaaatcgttggctgctctatcatgcttcttgatgaacgttgccaacttgtcggtacgacgcacgcatcgaggacaattgtatcgggcctccaatatttaaaccggatggggtatcagttgtttttaccacaaaccgcctatacacacctttctatgatattggaaaaaggacaagtggaagtgttgacagtgtttcctgtaagaacgaatagaccaaagcaggcgatgctcgttatgtttggccatataccagcactcgaaaacggtcatctgttaacaattgaacaagcggtcaatgtcgtagcttttgagttaatgaaaaacaacgcattgcaacaatatacaagaagggcgaaaaatgacttctttttgaacttcataaagaaagcgtattcgtctaaaaaggagacgctaaatcgagcactggaattcgatttgcacaatgaccaaaaatacaaatgtattgccggacgactcgatacggaagaaaaacaacttggctttaaacaaaggcaaattgaaatcgaaaaagtgtttgattttattgaagaagagttgactatttttccgtttgtatctcatttgtttatcatgaatgacatctgcctcattttagtagaaggggaatcggaagaactggcaagcgaagaatactcgccgacattgatcgccttggaaattatccaagaacgggtagcggcccattttgaccggacgatttcgtttggcgtcagcaatgtatgccatgaattttgggatgtgatcgaagctcatggtgaagccattaatgcattaaactccggccacctgtcaggaaacaaacaatttgtgcaaacataccaagcaaaagacatttcaaagctgttgcggatgattccaaatgaagaccttgctgagttttgcgcttatatgttgcaaaagctatcagatgcgcaagtaaacgatttaagtttactacagacgctcgctgtttatttggaaacgcattgtcagatttctgaaacagcgaagcgtctttatgtccatcgcaatacgatcatttaccgtcttgaaaaaattgaagaattgctcggaaaagacatcaaagatccagaaacgacgttgcatttacgcttagcccttcgcatccagcaaatgctttccgaacaaagcgacttgttagaacagccaagcgttgagcgatgatttggttatttcgcctaatgacagcagaccgcctttttcgtacgatttgaaggaattcattagagaaaagaggagaggcactcgtgacgacgttggaagagctcaatcaggccgattgcgcccgttttacaagtatgcttggccacctttttgaacactcgccttggattcctaaggaggcgtgggctagacggccgtttgcctccatttgtgatcttcatcgggaaatggtgatggtggtagaagaagctacttatgaagaccaattaagtttaatccaagcccaccccaggctagcggcgaacgaaaaggtaggcgcttcttcagcagcagagcagcaagacgcaggtttggacgttcttagcaagagggaagccctcgctttttcccgattaaacgatgtttatgacaagcgattcggttttccttttgtggaagcggtgaagggaaaaacagcacagcaactatacgactctttggcagaacggattaacagcacgaaagaggctgaatttaaccgggcgcttgctgaaatttttcaaatcgcgtggtatcgcttagaagcgttcatcaaacaacagaaagggttggtgtagaagtggaaaataaacggacaatgtcttatggaaaagggaatgtgtttgcctaccgaacgtttatggaaccgttaagcgggcttcagccgatccctgaatcggcatttgctgttcgggataacactgtttttggcatcaatgtcacagttgaggtcgggggaaacgcttttctgtcgtcttttacagatggggacaatcaaatggttgtcgcaaccgattctatgaaaaattttatccaacggcatttagcgactttttcaggacggaccattgagggctttatccgttatgtcggggaggcttttctaacgacttacagccacatagactgggtcaagctaacaggcgaagccgtgccttttgaaaatactacgtatgcaaatggcgaagaatcaagcacaagttcactcgtttataagcactcgcgcaatgaacgaaacgaagcgtcgattgagctcgttcgcgaaggaaacggctggcaaatcaacagccagaatagcagacttcttgacttgcagcttgttaaagtgaaggacaattcatttgtcggctttattcgcgatcaatatacaacgttgcccgaagattccaatcgaccgcttttcatttacttgaacattggctggtcttacgaaacagacgacgatgcgctaggggaggagcctgcccgttatgtagctggagaacaagttgccgatctcgcttcttctgtttttcatgaactggcctccccctcgattcaacacttgatttaccaaatcggctgccgcatgttaaaacgatttcctcagctgcaagaagtgacgtttgaatcgcaaaatcgtacttgggacacagtcgtggaagacattcccgaaacagaagggaaagtgtatacggagccgcgcttgccatttggctttcaacggttttccgttacaaaagcagatctcggccctcaaaccacgtccgctagaaccgagaaagcgcgattatgagcggcttaaccactcacgttttagacattggccacggcgttcctgcccgaggagtgactgtcgccctttatcgtctccagaaaggagagtggaaagcaatagcaacagcagcaaccaatgcggatggacgaatcgattctccatttctcaccgtcgagccgctccctggcgagtaccaactcgtgtttcatattggagaatattatgccaaacgagaagtagagacgtttttaagcaccgtgcctgtaaggttcgtcctttcttcgccccaggaacattaccatgtaccgctacttgtgtcgccttggggctatcaaacataccggggtagttaaaaggaaaacttgttttctgtgctcataaagttaggatgatagctattccagtttgttgaccgactattttgaaatcgtttgaatgtccttgtatgaaagatacatgaatctcttttaagagtatgtttcattttgagatcggtacatactcgctcacatgtcagctttggcgtttttctcattgacttgtgccagggtgctagcgccccccggcaatttttttgcccttcttctcttttttgtgtaaacaatcctaacaacaaaaggggcgggttcatcgaaattcttcgcttttccctattattgtttatctaattgttccaacaaaacgtgcattgtttagctgttttgcacaaagatttttctgatttgttgcgctacaatgtggaacaacatttgagtaaaggagagagcgatggaaaagcatatcccacagtcagttacgccggaaccgatgccacagccagaaccgcagaaatcgaggggacggatgccccatatttatgtgttgttgtttttgattagcggcatgtccgcgcttctaacgtatgtcattccggctggttcatttgagcggatacctggcccaaatgggcgggagacgattgaccctgacagctttacgcaaatagacgggtcgcctttatcctttatggactttatggttgctattcctagagggatgtctgatgcaagcgagattatcttttttacctttatcatcggtggcatgtttatggtgctgcgccggacagaaatcattgagattggcgtcgacaggcttgcccgcaaatttaaacataatagtgtgttgatggtgcctgtgctgctcactttgtttgcggcagtggcgacgacgattggcacgccagaactatcgcttgtttacattcctgtattgattccgctctttatttcgcttggttatgattcgatgactgcgacggcgattgcccttgtttctacagctcttggatttacggctggaatcatgaatcccggcacagtaggaatttctcaacaaattgctggccttgatacgtattcaggctttggtttgcgcttgcttgtatttgtggtcattgtcaccatcggcagtttgtatattatgcggtatgcggcaaaagtaaagactcgtcccaaagagagcttgacttatacagaagacaaaccgaaacggctcatgtacaaagacgcgcttaatcaaccaatgaagccgattcacagccggcaaatggcggcgattgcgacgttgccagttttctttgcgatccttatttacggggtgacacagcttggctggtttatgcttgaaatgtctgggttgtttattttcatgggcattgttgtaggcttgattgccgggctttcgctcacaaagatttgtgaagcctttacggaagggtttcgcgaagtgttgatgggggcgatcattattggcattgcccggtccgttgcgatcgttttagaagacgggcaaattatggattcgattgtttatgggctcggcatcgccgttggccagcttccaagcacactaagtgccattggcatgatggttgtccaactgttgatcaatttctttattccttcagggagcgggcaggcgttagtaacaatgccaatcatggcgcctttgtctgatattttgggcgtcactcggcaaacggcgattctcgctttccaatttggcgatggctttgcccacgtgctgtttccgacttccggttactttatggcagcccttgttgttgctggcgttagttggaacaaatgggtccgattctttttaccactgtttttaatttacatggccgtcggcatggcatttttaatttatgcacagtcggttggctggacaggctaagcaaacgagaggagaacggcaaatgctcgatttgtgcattactgggggacgagttgtgttaccatcgggagtagaggagaccgatgtcggcattcaagctggcaaaattgcccgaatcggtccaattggtaaaaaagaagcgcgttgtataatggacgcaaacgggcaatatgtttttccaggagctgttgatacgcatgtccatttttctgaaccaggaagaaccgagtgggaaggatttttcacaggcagccgttcattagctgctggcggtacaacgacttatgtagaaatgccattgaacgctctgccagctacaaccaaccgcgccaatttgcaacgaaagcttgaggcggccaaagggcaaaactacgtagactacagtttttatggcgggcttgtgccaaccaatctccacgagttggcagacttgtccgccagcggcgttgtcgcctttaagtgttttctctctccatgtggatcggatattccaggggactttcgcaatgtcgatttgaatggccttcgcgcaggcatgcgcttattagcagaaaaagggcagctcctttgtgtccatgctgaagatccaagcatgatcagtcagcttgaggcaaaactccttagcccagttggcgctgacgcttatgtcgcttcgcggccggttgaagcagaagtaaaagcggtgtgcgacacgcttgccgcggcgcgggaaacgggttgccgaatccactttgtccacatcagttccgccgcagcaattgaagcaattgagcgggccaaagaggaaggcgtcgatgttacagtagaatcatgtccccattatttcttactgtctgctgaggagttagcggagcttggcccactagcaaaatgccaaccgccacttcgcccgaaacaagaacaggcgaaattgtgggcttgtttgctagagggcaaaatcgactggcttgcttctgaccactcgccgtgtacgcctgacttgaaagacggcgatttcctgacagcttggggcggcatctctggctgccaaaacaacatcgatatcatgtttgatgcggcagtcaagcggcgcggcatgccacctgagcaactggctcgtctcattgcgaccaatccggctaaacggatgaacttgcgagaaaaaggggaaattgccattgggaaagacgctgattttgcgtttgtggatgatcggcaaagctacacgctcacaaaagagcagctttactataaaaataagcatagcccgtatgttggccggacaattggctgcaaagtgacgtgcgtgcttcttcgtgggcaaacgatttatacagaggaaaaaggcatcattggaaaaccgagcggcgagctgctccacattcattaaacaggggggatggagatgaattggcacgcgtttatagacaaagacatgaagcgagaaggagcgaaagctggcatccttgcaggaaagacatttgctgtgaaagacgtgtttgctgtgaaaggttacacaaacagtgctggcaatcctgattggcttaagacagcgcaaccagcagacgcagacagcccgagcatcgccaaacttttggcagcaggtgctgatttgcgcggcatggctgtcaccgatgagctcatgtacagtttgaatggcgaaaacgtccattatgggacgcctgtaaacccgtacggcgccgaccgcgtaccaggcggctcttcaagcggctcagccgtagcggtagctgctgaactgaccgattttgcgattgggacagacacaggtggatcgatccgcataccgtcatcctattgcggcatttatggctttcgcccaagccatggcgctgtcgacataagcggggtgattccacttgcagaaagcttcgatacggtcggttggatggcccgtgatgtcgaattgctaaaggatatagggactgtcttgcttggcgatcagacagtggaagaagaagcgggcgagcaacttttgattgatgaggcgcttgtgggcatcgcagagcctaacgttcaagcacttgtcttgcaggcggcggatcgcctcggcgctaaaccgatttcccggtggacatccgacaggatcgacgaagggtttgaaacgttccgccaccttcaagcacgggaaatttggcggcaacacggcgaatgggtacaagcagccaaacctgcctttgcagctgatattggcgcccgattccaatgggccagcacccttcaacaacaggaactgccgctctacaaggacaagcaaactgcaatgaagcgcgcctttgcagctgactttgcgccaaacgatattgtgctgttgccgactgccgctggtccagccccgaaaagaggcgggtctgggcaagaactagaagcgattcgggccaagacgatgaagttaacgtctatcgctggacttgcaggctgtccgcaaatcaccattccgtttgcttcagttgaagggctgcctattgggctttcggccattggctatccgggccaggacctttttttgctctcttgggccaatcgtttatttggggttcatacataatggaagtttttgaaggtgaaggggttcaagtagatgagcatccatcttctgagtgtttcatgcttttgctacaagggtattcactgaaggggttttgttattgaaatccttgtaagtgaattttttttgatgtgaacgttagaaaggggccaaactacatagaggaggggcagaaggagacacagccctgaatacttcaggcattcagctgtacaaaggagattgggccatgaacaacatagcggacaggctgcattgttttgttaaaaagcaatggatcatggcgcaaacgtgggagcatgtcctgtttgctcattggcaagtatcgaaaacgcaactaacgccgctgcttcctgcagggcttagcttggatttgtatcaaggcactgcctgggtcagtgtgttgcctttttatttgagcacattacgccctcggtttttgcctccctttccaggggcgaaagcattccccgaattaaacgttcgcacatatgttatacacgatagaagaccaggcatttattttttcagcctagacgcaagccactttcttgctgtacagatggcacgcacgttttttcacttgccttatgttcacgcaacgatgacgttcacagaacaacaggagtcgatccagttttggagccgcagaaacacggaaagccaggctgaatgcacagcgtcgtattttccgatttcgcagccaaagcccgccgctcctggctcattggcgcattggctcgtggaaaggtacaggctttacacctcatcctcgaagcatctgtattatcaagatatcgaccatgagccatggcaattgcaaaaaacggctgccaatgtgaaggcgaacgaggtagcgctcgctgccaacatcgatttgccagtgcaagagccgcttttccattatgccagaaagcaagatgtgcggttttacccgatggggaaatgccaaactataaaggagttgcctaaatagacaactcccttgggggcttgtgcttttatgaagaggacgtgctcaatcggtctgaaccaatgcctaatttggccaagtaaatatggaagaagtattcgccgacggcaatcgcaatggctgaaatggcggcagcccctgccatcgttttcggtgcaatcggggtaagtgccattcctagccaccacacaatgaaaaaggcaatgaccgaatcagcgacagtggccattatgttcgtgattttaggcaagatgagaatgtcgcctaaataggcaatccccacaagaatgactgtgattataaagacattcccaaaggacagcccaaaaccaaaacctaggaataagtaaaggagcacgagtgtcatgatgcctttaacggctaatgcttttacatgtttcatggtgattcctccttcgtatacctaaaagttattctattacacgtcctcatcagctggtggttggtgaagaggaggagggactaaccagcctttttcttttagcagttgcaaaaactttcctgctaatgtcgcttttgaagcatgaaattggccaaacatggcggcgatgtcttcacgaatagactggcccatgattttactgcatgccacgagtcccgctgcagtcgtagcagaagcagaggctgctatatcagcgtccataaaacgggcgcctggtggaatgtcatcaaggtttgcttttggcggttctggtgctgctggagggagggccacgccattttccttcaacagttcagaaacttgtttaacttcctctttgctttgctccatgcatgtatgaagcagtttctttaaatcgtcgtcgccgacatggtttaataacaccccgtattcggcaatcattttgttgcctgctaatacaaagccccaggcgctgtatacttcaccgtaatgcataggttcttctttaggatttccacttaaaatacccactgttttctctcctttctaagctgtttgtctctaacgtgtttcattttccacgatagaatgcccaacaaataaaggagatatgtatacgaataggattgtggtgaaaacgattcggaaagcttttgcatcaagatgcgatcgcacctccctacgaaatcacatacgactttgtcgcgatttgtatttgccttttggaaatgttttatgaaatcataagcgcaaacgactacgcggtggttttgcgattacgaataggggaaactgaaggaaaaggagggcaagccccatgcacgttaaaaaagggaagttggtcatcgtgattgttgcggcaagtgctgtggttgctgtgctttttcttataaataagatgaacgaaagcgagtcttccattgccggagtcgatttactgacggaagtaacgtcaacaggtgagcaagtcgttggagcagcgattgaatacacggtgccgattacgtcgactaacttatctgaaacaagctattcggtacaagcaattaaaggcggccatcatatttcaagaaacgtcgaacatgtttacgtcggccaagcgcctgaacttggcaatcctgtaagtgaagggcattatgtcattattgaatttagtggaaacgacttacatggaggcacgcttagttggaatggcagcaagtatcaaagcagtcggcctacaccaatgtatcggattcaacaggttgaagcgatcaccaccaacgacgggcagcagttgccgccaacgagcgacgaagtcgtctcaactggcgaacgctcgcctgtagttgagtctttttcttatgaatcttaccaaaatcaagcgggagcaacgttgccgtaccggttatatgaaccgaatcaagaagagggagaacgctatccgctcgtgctttttcttcatggcggcggcgagcgaggcaacgacaaccagatccacttgcttggcagcgaagggggagtcgcctttgcccgcccagatgtgcaagaacaacatccgtcgtttgtggtagcgccacaagccccttatgacccttccgtacctttgcttgaagggtggacaacagaaccaacgtatagcatggtgcttgagttagtcgagttgatgaaagagcgctatccaattgatcctgaccgtatatatatccatggcatgtccatgggagggattggaacgtggaatttcattgaaaccaaccctgacttatttgccggagcgattgccatttgtggatacggccaccctgaaagggcagaggcgataaaagatgttcccatttgggcattccatggcgaggatgacaaaattattgatgtgtcagggtctcgcttaatggtggaggcgctcgaaaaggtagggggccatattcgttacaccgaatttaaaacaggagagctgcgttcccctcattcagcttgggggccggtatacgaagacaaacgggtaatcgagtggttgtatgcgcaatcgcgggccaactaaacgaaagctctttactgccactttcccgcagtaaggggctttcggtatttcaagatccacatgctatgttataatcggactattctaataacaggaggcgtttaagtatgcgcaaaatgaacatgaaaaaccaatggaaaggaaagaaacaaatgaataggagctgttacaactattatgaaaacaatcaacattggggtgttggcccatgttgatgccggcaagacgacgttaaccgagcaaatgttataccaagctggcgtcatcaaggaagccggttcagtcgataagggcaacacaactaccgatacacttgcgattgaaagagaacgaggcattacagtcaaagcagcagccgtctcttttttctggaacgatgtaaaggtgaatattattgatacgccaggccacgctgactttatatctgaagtcgagcacgcgctaacgattttggatggcgccattttaattgtatccgctgtcgaaggcgtccaagcacaaacgcgtgtcttgatgcagtcgctaaaagcgtaccgtatcccgactgtattttttataaataaaattgaccgtgttggcgccgactataaacgtgtcattaaacaaatcaagtggttgcttgacgaccacatttgcccggtgtgcgaacaaacacagggcgacacggcttattccattaaagccacttgtccgcaaacagctggctggctagacgttctcgcgcttcacaacgacgagttgttggccgcttatgttgaaaatgaacctgtaagtgaaatggaattgcggaaagagctgtcgcaacaaaccaaaaaagcagtggcttatcccctttttattggttcagcagcaaaaggagttggcgttgccgccttgcttcactcgctttcccattggtttagccacacaacagaggaagcgtcggagcgggatctttctggcattgtgtttaaagtgaccgagttgcctaacggcgaacgggaagcgcttgtccgcctttacgaaggaaagctagtcgctagaaaaatggtttcagtcatccgtgctgaccacccatccttttcggtaaaagtcaagcatctacaactgttagagaatggcgggcggactggcgcttctgccgtcagtgctggcgacgttgctgtattgcgcgagaagtctctacaagtcggcgatatcctcggtaagcgtgtgccccaaatgaaacgatttgcgtttaaaaaaccgccgcttcaagtacaagtgcacactgaccgcaaagaggaggcaatcgcccttcatcgggcattagcccgtttagcagcagaagacccgtttttgcaatatacacaagacgcggctacaggcgaccactttatccgcatatttggccacgtccagcaggaagtgcttttgtcggcgcttaaaaatgaacagggcctttccgtttccatgagcgagccccttgtcgtttgtattgaaaaaccttcaggcgttggggctgctgtcgaatggattggtgaaaaaggcaatcctttttacgccactctaggctttcgagtcgagcctgggccagaagggagcgggctctcttatcaactcgaagcagagcttggttcgctgccacctgcttttcagcgagcagtccgtgacacatgccgagttgtattgcaagaagggttaaaaggctgggtggtagaggatatcatcgtaacgctcacccatacaggttattggagtcctgtttcgacagcaagggatttccgcggcctggcgccattggtcttaatggaggcgctccggcaagcaggcacatccgtctatgaaccgttagagagaatcgaagtgattgtgccagagcgttttttaagcactctcctatcacgagtcgtccagctaggaggaaacgtgttagagccagccttccaccaagccggcgtcctcataaaagggaccattcctgtacgaacggcaacccgtttaaaatcatcgatacacgccctttccggcggagaaggaatcttaatctctaagccaggcgggtacgaacgggtaacaggaaaggctcccgcaaaagaacggaggcagttgaacccattagaacggacgaattacttgatgcgctttagccataccatgtaggtgctataagtttaaatcgtgctgcttgttaaaaccggcaaggacagcgaaaaaccctttcgcctgaaagggtttttcggatattacgttaaattcttagaacggactagcgttccttgtttttaggcatttcctatttccgttgcccagcttattgtttttttataaagtattttatagcgaaatatataaaaacagctatccaaataatgattaaaagataatagtaatcctggcttactagaaggatgcctgcccctgcaatgagtacaatcatcatatctactttatttgagctttttttctgcttgcttatgaacactatgaggaaaacaacgatgatgataacaaatagagaaaagatagatacttccatatgataactcctttaaaaatacgttccaatacacgaacattctctgcttttttctgtattacaaggaatcccgaatgacccctcgttattgcgtataagcatttaaaataaaatcgactttattcattgaatgacgaggagggacgaaatccctttgttgtttaaaccacttataacttctttcaagccctttttcaaggttgatagcgggtgttggcaggccatcatttgttaatttagtagtatccataagataagaaacgtcacgaaaagggaaaaattgctttgaaccaatctcattctctgttaaaaatttttgctctacctctattatttttgaagggctattcgttattttcttgaatgtactcatcagagacttccaagtgatggtttctcggtgggcgaggttgtaactttgacaaactgcatgacgattctcgaatgtagcgagaatcgtcctaagcacatccgcaatgtgtataaattgtctacatcctctatcgtatgcggagatgtcgacaatgtaatggtattgtttgtgtttaagtgctgctgtcaaatccgatcgtttttttctattgcattttatatgggttgtataacctgaaatcgttgatcttcttcttcctgtcgtcaaaaaatcaactgaataaccgaggttgatcagttgctgaagaaaggctttccctacaaattctgtcccgcccataactaaaacttgtttcaaacagcccacctcgatttactattcgtaaaatgtatgtccattatatgattgaaggcaaccagatacaattccaaaataacctaaaagaaggctttttcagcgtttcccgtagctccaacaggaaacacccgatacgattatctataaaccctcctattctctagagcctcggtcccattcgattcatgattttcctgtcctaatggaaacggtatacagtataatagtaacaaggagggcaatagatgaatttatttattgaggaatttggtgacaagcaagcgccaatgatgttgtttttgcatggcggcggattagcaggatggatgtgggaggaacaaatcgactatttttcccactatcattgtgtcgttgtcgacttgcctggccatggaaagagcgcccatttgcccttttcgatcaaaagttgcgctaaacagctaattgaattaattgaaacgtatgccccaggcaaggagacggtgctggtcggtttatctttaggggcgcaaattggccttgaagtgttaagcagccgtccagatttagtacaggctgcaatgataaacagtgcgaatgttcggccgtctccaacattgaaaagatggattcgccctgccattcacataacctctccactcgtaaaaaacaaatatttttcaaaactccaagcaaaagcactttatataagggagaaacattttgaacgctactatgaggaaagctgccaaatgaaagcaggtacgcttgcgaacataatagaagagagcgtgacctaccagttgccttcttctttcaaggacgtggaatcgaacgtgcttattgcgattggcggaaaagaaaaagccgtcatcgccaaatcagcccggcaaattctgaaaagcaacaagcattgtatcggtattgaagtaccaggtgtagggcatggcctttctttggcgaaaccagctctttttaatgaaatggtggactgttttctggctggatcagccttgccaaaagggtgcgtcccgttataaatatgtcagtctcgtttaacaagagctgccaaggggcatccatgtatataaaactgtgaaaccgcttaaactaaatagaagagggttcatgcaagaaaagagtatgcgtgaatttttagcgcatggagggacagagctatggagattacgattaagcacctaacaaacgaggcgttggcgcaagaagcgcaagagcaatttgcggcgaacgggatcatgaggagagaaggctattttcggacatgccttgatgaaaactacaatggcgatcgcgtcactgttcttgctttttatcaaggaacgctggccgggtgcggccatctcttgaaaaaatcgccgtatgcccaattccgtaatcagcgcattcctgaagtaaatgatcttgttgtttttccgccatatcggcgtcggggtgtcggccaagcccttattcacgcactcgaacagcttagccgtgatttaggctatcaaacggttggccttggcgttggcttgtataaagattacggaagcgctcaacggctctatgcccggcttggttacattccagacggtcatggcatttgtgctgggggtgagccaatcgacgctggcagtcatacggtcgtcgatgatgagctgttaatgtattggacaaaaaagctaaagtaagcttttctactattcatctatcaagaacaaatgatacacgtacggagcgtttttctcccgtcttggaagcctagacgggcttctttttatatgagcttcatttttgaacgggaaatgatgcttccatcttgttcgctgatcgattatgttatacatagtgtaggccatggcagccatagcaaatttatcaatcatgggaggaaccataatggcattattagaacaaattaaggaagcagctgaatatattcaaagcaaaagcagcttatcgccgaatgtcggaatcattctcggttcggggcttggaaatgtagcagacgaaattgaaaacaaggtttcgattgcctacgaagagattccccactttgccacctcttcggccatcggccatgcgaaccaattggtgatgggcactttaaaaggccagacggttgtggcgatgaaagggcgctaccatttttacgaagggtatgatttgcagcaagtcacttttccagtacgtgtcatgaaagcacttggcgtgaacacgctgttgattaccaattcttgcggtgctgtcaataccgacttttcgccaggggagttgatgcttattcgcgaccacttaaacctagttggcaccaatgcgctcattggcgaaaatgaagatgcgcttggaccaaggtttcctgatctttcggaagtctacagttcccgtttgcggcaaatcgccaaaaccgtggcagctgaacaaggcacaacccttcaagagggtgtttatagctggtggagcggccctgcctacgaaacgcctgcagaagtgcggatgattcgcattctaggcggtgacgcggtcggcatgtctaccgttcccgaagcgactgttgcggcacatgctggcatggaagtgctaggaatttcctgtttaacaaacatggcgtgtggcattttagaagaaccgttgagccatgatgatgtgatcgaagtcgctggcaaggcaaatgccgcttttaccaagcttgttaaaggcgttttagaccgtttgcaggcctaattttccaccgttagtcggtcattagcgtaaaatgtttctaaagtggcttttaattgtataatataagaacaagtacaggattgataagcggcgaagttgccttatcagttggtgtttcgccacgatatgtttttaaggttgaaaacccctactcaccggtaggggttgattttatggtaaaaagaacataacaatagtccattaacgggccgattgtagaatatcgcagttaaacctatgcaatagaaataaattccatgtagaggtggagttgtatgccaaaaatggacaacatgctagcaattctatggatgcttagttcaggtgaaaaagtgactgcaacacaaatttcggaaaagttagagatgaatataagaacggtgtatcgttatatggatacactttccacaagtggggtgcctatcatttcagacacagggcattacggtgggtacacgttattgaataagtttattgaagccccacttttttttgattttgaggagcaaacctccctatttcacgctgctgtttttgcagaagaagccggatattatggaggtgaagcactaaatagggctactttaaagctaagcaactattcaacgcaagagcaggaaacaaagatcaaccaacatttaaccagccttgaagtaataaggcaattaagttccctctctatggaagctttcttaaaggaattggagcaggccgtagctaacggatactctgtaaaaattttatactataaaaaaggcgaagagcaatcaacgtatagattggttgatccgtacaggattatatattggaataataagtggtatgtgattggattttgccatcttaggaaggacatccgtagctttagagtagatcgaatggaaagtctaatggtgacagaaaataaatttaaccggcccgaaaatttttcagcacgtgacttttttatgaaaaacctccttccaactatagaagataaagagaagatgatgtcgttagttattaatggaaatacaaggacgttggatgatatgtgccaacattggtttttagggcattatttacaaaagcggacttccaatcaagccgtatttcttcttgaaaaagagatgatgtattcatatgtaccttatttacttttgtcgtatggcaaatcaattcaaattgttgagccaataagttttaagaaaagacttattgaagttctaacagatctaatagaatttcatcaaaaatgataacttccctgacgttagctgtcagggaagttatcttataatagcgatatcaattgtgatgggagtggtattggatgcgagcaaaagtttatctttatgtatttgatacaatgtcagactgggaatatggatatttaatggcggaactaaactcaggaagatatttcaaaagggatttagcacctttcaaagtaattacagtaggcgctaataatgaaatcattactacgatgggagggttgaacataaaaccagatatttccgtaaatgagtgtattcttgaaagcaaagatcttttagttttacctggagggaatacttggggagaaggtagtcatcaaccgatcttgaaaaaaactggcgatgctttaaagcttgggactattgttgctgccatttgtggtgcaactgagggactagcgaattttgggtacctagattcaagaaagcatacaagcaatgatttagagtatcttaaaatggtttgtcctagttataaaggagaaaaattttatgaaatgagacctgcagtatctgatgggaatttggttactgcatcaggagtagcccctctggaatttacgatggaagtactggaaaaattagatgtatttgcgccagatacattgcattcatggtataacctaaataaaactcatagagctgaatacttctttcagttaatgaattcaataaacggataagctaaatcaacttagcagattatattagttttaaaaaatgaccatgctttagacgatgtcaaagtgtggtttttgtatattagttaaaaatatcggaagaatggatggagccgatttactggaacggtctcgaagggaagggtaaggaagacggagacaacaagcagaacagcgccaaagggttggtcgtagataagcttctcccgtcgtcctttaaaactccaaatttagaattacgcatttaacatttctcttccaatacaacggagaatcacggaagttgctactgtcgcggaggagatgttcctatctctttatagacaaaacgtcttgcaaaaactaaaaaagaggaggtgtctagtgatctagaacgcctcctcttggattactccttttccaaaatccgcgaagttacttgcttttcaagttcaattaattgtttattggtcacatctcttggcctgctcaaaggattttcgacatcaagggcaatgacgccttcttcaattaatataatgcgatcggcaagtttaacggcttcgcgtacatcatgggtgacaagtaaggcggtaaactggttttcttgccaaatcgtttcgattaagtcttgcatctctgatcgagtcagcgcgtcaagggcactgagtggttcatcgagcatgagcaaatcaggctccctgatcagggcgcgtgctagggcgacgcgctgttgctgcccgcctgaaagcgtgctcggccattcattggaaaaagctgataaaccaacggcatggaggacgctctcgcctttttgctgccaattccctttaaggccaagcccgacgttatcgatcacttttttccagggcagcaagcgtgagtcttgatacatcatggtgatgcttgcctgtgacttttttaatgttgccccattgaataaaagggcgccgctgcttggttgttctaaaccagcaacgagacggagcaacgtgctttttccacttccgcttttgccgacaatcgcgacaaattgccctgcttcaatcgtaagtgtaatatcctttatcacattttgatcaccaaacgttttttgcaattgtgcgatgcggatttcaacgccgcgctttgtcgtttgttttgctatagccataatcgttctctcctatttccgataattcggatgccagcgaagcgcttttttctccccgaattgggcgataatgtccgccagcttgccaaaaagggcgtagatgataatggtaacgataataacctcggtttgcataaactgccgtgcattcatggccaaatagccgatgccgtcgcttgtggcaatggtctcagcaacaattaatgtcaaccacatcactccgagggcatagcgaatgccgacaaaaatggaaggcaacgccccagggaggtagacatggcggaaaagcccccagccttttaggccatacattttccccatttcaatatagcctcgattgacgctgcggatgccatgcaatgtattaatgtagatcgggaacatgacaccaagggcaacaagaaaaattttcgacgcttccccgatcccgagccagacaatcacaagaggcagcaaggcgaggtgaggaatgttgcggatcatttgtacaaacgtatcaaccgtgtaaaaggaccacgttgaccagccgttcaaaatgccaagcaggagcccgattgcgccgccaatgagtaagccgatgaacgcccgatataaactgatttgaacatgttctaaaagcgtgcctgaaacgaccagctcatagaaggactcgagcactgatgtcggcgccggaaacaaactaggggagacaatttcaagcatcgatatgatttgccagataacaaggaacaacaacggcagcatccaaggaaggatttgtttttgaaatgtattcgtcatgttggcacctacttgttattcaatgttgtctgttgcccatgctgcatcaacaggcatgatttcggaaacgtcgacttcgttttcaatgaggccaatacggtaataatcatctgcctgtttttgctgggcagcgatgatgtcttcgttgatattttcaacgccatagtcacggcgattcacgacagtgtccaggatctctttctcaattccaatcatattggagagcaattcggcgacttcatctggattttcattggcccattgatcggagcggttcgtttcttctagcaaaatttgaatcagttctggcgattcctcggcaaattgcggcgtggaaaaatagaatgtccgattcgggtacccttcgacgttgtgatcgagtgtttttacgtcaagggtatgttcgactccggcgaaaaatggatcccacgaggccagtgcatcgacctccccagtctcaagcgcagaacggccttgtgaggcatcgcccatataacgaaaatccacatcatcggcgcttagcccctcagcttcaagggcaagaatcgccaaataatggtggttgcctcctttcattgccgcaatgcttttgccttttaaatccgccactgtttcaatgccagaatcagactttaccatgatgccgacgccttgttcatgaggaaggctagcgccgacataaacgatgtcgcgaccttgtgcttgtgcaaaaatgccagggccatcagccgcgtttccataatcaatgttgttggttgacaacgcctccatgacagcggttccttggtcgaattcaatccattcaaccgatacatccagtccttcctcttcaatccgctcttctaaatagccactttctttcagcacatttagcgtattcccagtttggaagccgatgcggatcgtttgtgcagcgtttgcttcggatggggacgacgactggcttccgcacgcggtcaagattccgccgcctagtaaaacaaaagctagagttagtattgttgatttacgcatgtgtctctcctccgttgaaaacataatgccccccatgaatcgtaaacagttccgtttggccagagcctgttaacataagctgaaacggccgttcgccacgttgctctaaaaactcattcaccggcccttgcccttttggttgggcaaatttcaagttccctccaggaagctgcaatgtgtagatgtcggcgtttaggcgtggatcgtaaatcgagcctttgtgttctaagtcgaaccactcagcccatttaaaagccgtttgctttgcatcgtggacagccataaggaagctgtcgattttccattggccagcagaatgaggggcaacgacttgagcttcctttaattcgtttaatcgctcttggtcggtttcgtgccagtcaataaagaaggggaggggtaattcggatccttcttcaccgacgaataatagcgaccattccaacagtttgccatcaggacgctttcggctaagaggcactggaccattcacgtttaagcctttttgcttgaatgtttgtgcgagcttatttaaatcccgagtgcgcaaacaaattttcgcaaaaccttcagtaaattcatcacgaacaatggaggaaaaaggactgtaggctacatcctgtgctcctactttgtcaaaaagggcacgatcatcaatgcttaaaaactcaatatactccatgccgaaatgaagcaacgtattgtaagagccccgtttttcatgacgacctccataaaccgtgtgaaagcctttattaataaaacgatctttcagtgtgtgtgcatcatccacatagtgaatcacatgatcaaaggcaagagccatctccttcactcctctattcatttagtaatcctattaattttatatgatttataattttaataaataaagtttaggggaaggacctcagtgtgtcaacaacttttgttttacagttatgcaaggaactgtttagaaaaaaagggggattgcaagttggtgaaaaagtgagaagcaaaatcggtgtgtaaggagcaagagtgttgggtgaggaacgcagatgtctgtaagcatgatgctggtccattccaacagcgggctttgccgttgtggtcgacgtcaaatctactacatgatgaaatttttacccctatggaaactaaaggaagttttattttgcgacatcgacacttcgatgttgatggaattctctagcgtatacaatagcggtgatcattaaaatggaaaaaggggatctgtcaatgaaacaacaacatgcgatcaaggcaaaaacatttcgacgtttacacgaacaatcttccacctttgtcctccctaatgcatgggacgcaatgagcgcaaaaatgtttgaagctggcggttttcaagcgattggaacaacaagtgccggcattgcggcttccttaggttacccagatggccaacagctgcctcgcgctaaattggttgaggtagtaaggaatatcgcccattcagtagcggttcccgttagtgccgatattgaagcaggatatgggcgatccgtggccgaggtggtgcaaactgtaaaagaagttgtagcggctggggcagtcggcattaacattgaagatggcacaggcaaccctagtaaacctgtcttctcgattttcgaacaaacagaaaaaatcgcagcgattaaagctagccatacgcccctatttgtgaatgcccgtacagacatctattggctaaaaattggcgattctttatcccgtttccaagaagctgaaaagcgtgcaatagcttaccaagaagcaggcgcagattgtttgtttattcctgggcttacggacagggaagaaatacaaaaaatgagggcggccatttcgattccgatcaatttgttggttgacccggaaatgcccgccctcacggagttgtcgacaataggaattgagaggctaagttgcggctctgccccatttcgggcaacagctacattgctcgctgctatttgcgaacagatcgttcacgacgaaacgttttcccatctgacaaaggatgttctttcctatagcagcataacgaaaatcatgagtcagtagatcggctactgctttcaagtgcctaatggccgacgatgcgtttatgaagaatatacgaataaaccatcggcacgactacgattacaacaatgagtccaatggacaataccgcactaatgtttcttggcaaaaacggttcgatgataaaaagcaagcctccgcctataagcaaacgcccaccaagacggtgtgtttttcgccaaacttcgtcattgctgatggtccacggcgtttttatgccgataaaccagttgggcttaatcgtctgcatgtagtttccaagaatgataaagaggatgcctactgcaactggcacgacccgattgattgaaacgggagcacctatgcctgagaggaccgtcacaatgctaatcgcgagaaaaagggcgatgagcacgttgccgataatcgaatagggccgtgtgaattttctatagttgtctttcttcgggtctatgcggggcaagtatagcaacatcgcataaacggcgatcaggattccattaagaagcaagaaggcagagaatgttggagcatagcggtccacttctccattcactccccaatgtacgggcatttccgcaggcaagtgtttataagcaaaaagccatacagcgatagaaattataattgaaacaattggaaagagatgttttttcatggttgttttccccctttttcaaaaaagcccattgtccaggaaagcagctcctgaaatacggttaagttgagcgagtaatagacgaactggccttttttctcgtcatggacaaggtgggcagcctttaacagttttaaatgctgggaaatgcttggctttgacacttgaaaatggttggcaatctcgccagcagttagatcctgttctttaagcaaatcaaggatttttcgcctcgttggatcggccaacgctttaaatgcttcgtgcatcaggggcctcctttcaaacacggcacatttaagtaattaagaaattacttaaatacttaactaacctaagcatacaggaatactgcttaattttcaagtgtgtatccctattgacaggatgaaaaaaagcgttaattaaacgtttgtttaatcgacaagatcacttgccgtgcttgaaacgtgttcgtttgcaatgggaaataaaccgttggacgagttcgttttgctgctcctgttttcttgtacagatggcaatgctgttgacgatggggacatgttcaacatagacgcgcgctaaatcgcctcgttttatatgttccttcgctactaaagaggaaacgaaattgatgccaaaaccggccatcacagcagaaagggcttcgttcaatccactgaactgcaaagcaatcgttggcggttttagatggttggcctggcataacgtaaataattgcgcccttgtcgagctgccttcttcgcgcatgacaaatggttcaattactacttccgccaacgagactcgttcattggccaatcgatgggagggagcagcgacaaaccaaagctcatcttctagccattcatcccaaacaaagtctttcgcgcgtttgtcgatggtgccagcatatatcgctatatcggctttgtaacgggccagtttttcaaatgcctgttgagaattgaccgtttcgatttgcaaatcaattgtaggatattgggctttgaatgctcctgctaattgtggcaataaaaagtttgccggaagatatgtggcagcgacatggatgtgtcccgcgcctacatcgcgaaattgttgagcaaatgcttcaatatgggtttcaaccgagaataacgtttctgctttgtcagcaagctgttttccaaatggcgtaggcacaatccccctgccgtccttttgtagcaaaggtatgtttaattccgcttcaaacgcttttagttggctcgaaacagctggttggctaatgtgcaaagcttgtgctgctttggtgatgcttcccgtgcgcaccaccgtataaaacaaccgaagtccgtgaagattcattccgtcactcccgatatataaataattgttatagattcctaaaaaagatcgattatttttattgttatgttgagtatacactggaattgtaagcaaaataacgaaaaggggttgggaatgtggaaaagcaaacttggcagctcgttgattcgtatatgacggaacgtttgcggataggggatgagggtctggacgccgctttagcgaataatcgccaaaaggggttgccagctattgatgtttcgccaacacaggggaagcttttgacgctgttagcaagaatgaaaggggccaagcgcattcttgaaattggtacgctcggcggctacagcacgatttgcttggcacaagggatgtcagacacgggaaaaatcgtgacgttagaatatgaacccaaacatgctgcttgtgcaaaggagaacattgcttttgccggttatgccgatcaggtcgatatcattataggtcccgcccttgaaagcctgcctattcttcacgaacagcagcaatcgtttgattttatttttatcgatgccgataagcctaacaatccacattacgtaaagtgggcgttgaagctggcttctcctggcgcggtccttgtcgctgacaacgtcatccgtgacggagaggtactaaaccgccacagcacggatcctcgtgtccaaggcatccgcacatttgtagaattattggagcaagaggaacggattgaggcgactgcgatccaaacagtaggcgaaaagggctacgatggctttattttagggattgtccactaattgaactggcaatgaatcacaatagaagcattaggggcgtttttccttttaataatggtgacacactcaaaaacagctagcttcaaggcatttgaagctagctgtttcatgaaatgattgactaaaagcgtgcgaacttaactagcatttttgtctggccctttctcgtacgtttcccagaatgtcgcatgttgaatgcccaactttttaggatcgaaaacagggtcaagcccttgttgtttctgagcttcataatcctttaaggcgatcattgctggcttggcgagcaggacgatggcaatgatgttgatccacaccattaaaccgaggccaatgtcgccaaggagccatgcatttgcagctgttcggttggcgccgtaatacgtcgctccaagcaacagcaacttaatgacaaccattggccaggccgcattgcgcccgcgcatcaaataggcaatgtttgtttcggcaatatagtagtaagccataatcgttgtaaaagcgaaaaataggagtgcaatcgcgacaaatcccgttccaaaagcagggaacacctggttgatggcttcctgtgtaaattgaggcccagcctcaacgccaggaatcgcttcaaacacatgcgtaccttcttcaggcccttgtgtattgtacatccctgtaaataagatcataaaggcagttgctgaacaaacaagcaaagtgtcaatgtatacagaggccgcttgcaccaacccttgcttagctgggtgtgatacttcggctgctgccgcgggatgcgcgccagtgccttggccagcctcattggagtaaacgccgcgcatgacgccccaagaaatagcgctgccaagcaagccgccaaagagagagtccattccgaacgcactgcgaaagattaaggcaatcgtttctggtacagcagataggttcataaaaataatgatggccgccatcaacatatagccaatggccataaatggcacgataaaagcggcggtgttcgcgatccatttaatcccgccaaaaataatcagccctaaaaccaatacaagaaacaacccagttgcccaagtcggtatgctaaaggcattattgacagcagcggcaatcgaattggactggacgccaggcataagcacagacatcgctacaagggctgcgactgcaaacagaatcgcaaaccattttacgcctaatcctttttcaatatagtaagcaggcccgcctcggtattggccattttgtttatctttataaatttgtgcaagcgtcgactcaataaacgcgctggaagcgcccagaaaggcaatcgcccacatccaaaatacagcccctggtccgccaaaataaatcgctgaagcgacgccagcaatgttccccgttccgacacggcctgccaaagcaacggataacgcttggaaagaggaaacgccggcatctgattttttgccactgaacataagggtaaacatatcttttagatggcggacttgcaaaaatcttgttagtaatgaaaaaatcaatcctacacctaataatgtgtaaacgactggtgagctccacagcacattattaataaactctaagaccacgtccactgtacgtcctccttaaataaagagatgttatttaaatattccatgaatttatcgaattcttatttgatggtcggctcctttcttggttcaactaagttattttcttataataaacggtattggcaaagatgaaaagaagatctttgtgaattttgcgatttgattggaagattttctgtcagccattgacgcatcgtccttatttgttttgggaaggataacagtactgatccaaacaggaggttgcttatggttgaactaaccaacaaggtcgtgattattaccggaggtgcgtctggcattggccgggcagcggtcgatgcgtttttggcaaaaggcgcaaaagtggtgatcgctgattttaataaggagacgggagaggctgctgttaaggaattaacagatgcaggcaagcaagtactgtttgtgcaaaccgatgtatcaaacgaacaatcggtgcaaaatatggtcgctgaaacggtgaaggcctatgagcgcgttgatattcttataaacaatgccggtttcggtacaatgagcccgtcccatgaaagaacatacgaggattacgaaaaaatcgtgaaagtatgccaagacggcgtttttttaggatcgaagcacgcgattaaagaaatgattaaaacaggcggcggttgtatcatcaatacgtcgtccatactcggctccgtcgctcagcccgaggcgctgccttacaacgctgcaaaaggggcagtcaatacaatgacaaaatcgttggcagttgaatatgcagacaaacagatacgcgtcaacgccgtagctcctgggtttgtagagacagccgccgtaaataaggaagcgcttggcgacttttatgatggccttgtcgccaaacatccaatagggcggttaggaaaaccggaagacattgcccatgcgatggtttttcttgccgaaaatgaatttgtcacaggtacaattctaacgattgacggcggctataccgctttataagcagagagaaacaccgtaaagacagctcgaatcggctgctttagggtgttttttggcggtcctaaaactacgccagactatttcacagtagccccttcttatataacgttaatagtgtaatcattttacgtgaggaagaaatgagacacatactaagaataagcaaaataataggtctaaaggcatggtttctatttgccgattggtttgcgctcaggagtatcgtactgttcaaaaggctacgcaagtgcgttagactaaaagaaggaaatgtttagcaaaatagacggttgttgatagaaaagtgggaaaaggagttcaacctatgcgctactactcaaaacgagattgggccatgaaagccattattgccgcggtttggctaatcgggattgccgtactcttttttatgtacacagacgattcagcaacattcttaatgatttatgtatttggcccaatgttggtattcggccttgtcttagtaaccgcatcaatcacgaatatgtattatgaactgcaagaagaaggcttgtatgtgaaagccggtttttactcttatttctttccatatgaaacaatggaaagcattcatccaataaaaggcttttacactcctggcgttaaagccgccatggctttaacaggcgtcgccatcaaagtcaacgacggcagagagttagtccgaatttctccagacaacgaagcctcattccgcgccgagctgatggaaaaagcgccccacgtaaaggaaattgatgaagccatttcgcaaagggaggataaaaaatccatttaaatctagcattggatcttccgaagagggacgagcatatcgattttcttgcgcttttttgtgaaaagctcttttttgatgacctagccgaaccaggaaacgataaatgttaacagtggggaaagcaaactaattgactccgcggtcaagaatggatatgatacctccatgagcagaccaagagaatttgatgttgatcgtgcgctgcgccagtccatggaagtattttggacgaaagggtttaaagcgacttcctatgatgacttgactagcacgacgcaagtgaagaaacaaagtttgtattgtgtctttaaaaataagcgcgagttgtttttacgtgcattagtgctatacagggaacagagcatagcgatgctggaggcattggcctctcaggaggggtctcctgtgaaaaaattggaggccatttgcgaggctacgctctgtcaaaacgatgaaacgatgagtcgaggctgcctcatcgtcaattcagcccttgaatttggaaccgatgacgaggaagtcaatcgcgaggtcgcattgatgtttaatcaggtcggccgtgtgctagagacggtcattcgcagcggtcaggaacagcaattgattacgtctcgccttacaagcaaagcgcttgcccttcacctgaacaacgctcttagcggcgcgaagattatggaaaaatcaggtgctccccgagaacagatcgcagtggtattgcgtacagcgcttgcgcttatgatggcagagaatgatggaagcttgtgagtgatatataacaacatgcatgtatgatacgttgaatgcgtgcatgtcttttttaggaaaattcttgactgtgtggtcaagaaggcgtatagaccgtatggaaaaacgtgcgagggggtgatacttaaaaacatagagggcatcaaatgattgattttctagactgttcacatacaaaatgaaacccggaggtagttatgacgaattcaacgtccgttcaagctttgttccaaccgttttcaattaaaaatatgaatctgtccaatcggattgtgatggcgccgatgactcgccaattttcacctggaggcgttccagggcctgatgtggccgcctattaccgccgcagagcggaaaacggagtcggactaattgtgaccgagggtacggtcattgagcatccagattcgtcgaatcaggaaaatgtcccgcacatctatggcgacaaggcattaaacggctgggccaacgtagtggctgaggtgcacaaagccggtggccggatcatcccacagatttggcatatgggtgctcgcggccatgtcggcgactatacggaaaacgatgtcgccgccatagtggatgcttttgcgcaagctgcagcggaagcgaagcggatcggctttgacgggattgaactgcacggtgcgcaccaatatttgattgaccagtttttttgggatcaaacgaacccgcgcacagatcgttatggcggtgatatggtggaacgcacccgctttgcggtggaggtcatcgaagcttgccgccgcgccgtcggaccggactttcctattgtgctgcgcttctcgcaatggaagtccagtgactatacggctaaattggcaacaacagcggctgaattggagcaatttctggcaccgttaaccgacgcaggagtcgatgtcttccactgctccactcgccgcttctgggaacctgaatttgaagggtctgatttgaatcttgctggttggactaaaaagctgacaggaaaaccaacaatcaccgtcggatcagttgggttggacagtgaatttacgaaactcttcgccgaaggaaagggagcaggtgtctcgaacattaacgggttgatcgagaaactggaacagggggaatttgatctcgtagcgatcggtcgggcattattagctgaccctgcatgggcaagcaaaatccgtgatggccgtatcaacgaactgacgccattttcgcccgacgcggtaaaaacactttactaaaagtaatcttgcaacaacgaaggagctgcgccgcagctcctttcgcgtgagtggcgaaattcttcaaagggaagcaatgaagagtagcgtcaagggatccacatttaaatgttcgataaagaatacgatcaaacattcgatctgacagggtttctcatatgaataataagagtctggccgtacctcccacatattttgttttcggttgttacgatcggagcttcgccaaaccaattgtgcagtccgaacaggaaaataaacgacacccgatctttaaaagtggattacaccttttacggaatgggggactcccgaatgttttctgtacatgtttaaacacgccctttttatgtttttttggcatgaacaaatttagtggtaggaggcttcgctaatgtacgtcttggccgcaatcagcattcatgcgaatccaagccagccaccgattgccctgcataacaacctatcccacttggcacactaacggtatgaatagccggaggagccttttatggatgtgtttggtgccgattatgaacaaaataagaaaaaattggtcgaggaaataggcgatcaagccgacttgacgattaaatatgcgtacgcgacttcattggataagcagttgacgtttttttatttcggagaagcggacatgcaaagaatggagagctgccttcgctacttaaatgggttgccagccgcttattttaaaaagaggggcagcgaggaggagtgggcgaaaccatcgattagctatgcggagtctgtagaactggatgtcaaaaaagcggtcaaatcgctgtatttggatcgggtcgtcttgctggtggagggcgtcccgtttgcgtatgtgttgcagttaaaaaagggaatgaaccgcaacgtggagcagccgacaattgagccggttatccgcggcccgaaagtgtcgtttattgaggatgttaacgcaaacattgccttagtacgccagtatggcgatgacgaaaacctcattgtcgctgaacatgttgtccattataaaaacaaacaaaagacgatccgctacattcaccataaagaaaaaacagagcctgctgttgtcgaagaggtagccgagcgcctgaagggcattcaacacgccaacattgaggattctggtaaagttgaaagttttttgaacaactcgcctttgtactcgccatttccgcaaatccagacaacagagcgggttgacctgattttaggcggcctagaagaaggacgtgtcgccatctttgtcgacggctcgccgtttgcgtttatggtgcccaccacgtttgaacagcaactgcaagcggcggacgattattatgagcgctggatgattagctctctcattcgcatactccgttacatagctttattcattacgttgtttgttgcacctgtttacatcgcgcttgtgtctttccatcaagggctcataccggacgaactgtcgctcacgatcatgaatacacgaatgaacgtgccctttccagcggctggcgaagtcgtcgtgatgacgctttttatagaattattgcgtgaggcgagtattcgcctcccttctccccttgggcagacaatcggcctagttggcggcgttgttgttggccaagctgtcgttgaggcccatattgtcagctcaatcatggtcatcatcatagcgctgacagcgatttcgtcttttgccgtgccaatgtataacttgagcttgtcttttcggcttcttagctttgtcgccatcctctttgcctcaatgttcggcctgtttggcgtcgtttgcttttttattgcccttaccattcatttagcaagcttgcataactatggcgtccattatttttcgcttaaattttcattcaaaaaacatggcatttacgatgccatcctccgtttgccgactgtactgaaggataagaaggggtgaattgcacttggccaagacgaacgtttatatgcagcggacactgactaatgtccagtttgcggcagtattgatgacgacgctcctcggtgtgggtgtgttaaacttgccgcggacgatgaccgttaacttaaatacggctgatggctggatctcggtcctgattgctggcatagccgtaagcctcatttttttgtttaatgtctttgccttcaagtctcatcaggttgactcgattgacgtttttatggagagagcgttcggcaagtgggtaagcaattttctttgcatcgtgattgccgtttactttctcgtccagtccagttggcaagtcgtggccatgagcgaaatgatccgctattttttgctagaagaaacgccctattatgtcgtcattggaatgattgtcattttaagcgcgtatgccgtgttttacccgtttgcaacgattgcacgcatctgctgtttttttctgccgatttcccttattgtgctcttgcttattctcgggcttagtgcagaggaagtggatgtgtatcgactacgccctgtcgctccagaagggtttggtccgattttcgccaatgtaacagaggcgctccaagcttttcaaggtgctgaagttatgttgcttctcctcgcttttctccgaacaggcacaaagcctaagaaaagcggtgtacttgcgttttcaacgataacagtggtctacatgttaatttatggaattgtggtttcctctctaggtgtggcagaagtaaaaacgctcgtgtggccaacgattgccttgacacaagctgcagaaagtggagcgttcttttctgatcgcttaaattctttgctgattagtacatggacactgcaattttttacgaccattgtgcttgccttgtttgcggcagtccatttgcttgataaacgactgccgatccgtcgtggctatttgttgtttgtatgcactgtgcttgtttttgcgattggcatactgccacagacgtactaccaaatttcaatggtaggcaagtgggaacagtatgcttttttgactatttttgcggtattgccattcctttgttacctcacggttgccatcaaaaagaaggtgaaggcatgaaatataagatcatcgcgctacttggcagtgtgctgctccttacaggttgctgggaccacacgaatattgaagactactcactcgtcatgggcattgggcttgggattgatgcagaggaaaaggaaaaggtcggcatgctgacgcaattgtatctgcctgttgctgacgccaaaggtgttgccgagctttcttttcgaaacctttatacaaaaggagaaacggtcttagacgcaacgcgggaattggagttaattgaccaaggaatattaagcgaccatcaactcgtgctcgtgtttcatgaggatgcgttaagaaagtggcgggccgaagagctgattaaccaaaaaatccgcgacgaacgggcaaggaggggcattcggatatttgtcactgaggtgccgttgcaaacactgtttaagtatccagtagaagcaagagtagcacctacatcgaaaatgttggacgcgcttgcgcaaaacaccgaccgctctacaaaagtactaccgccggtcacacttgggacgttgtctgacaacattaatcgtggctacacgatgattttgccaaaagtgacagtgaaagacggaaacttggagctagacggaggccaaattttaaagaaaggcgtccatctagccgattccctctcccctgaccaaataactagcttaaactggcttacaggcgaggtgaaagcgggcgtcgtgcaggctaaagtggatggctaccgagtggtatatgaagtattaagctctcggatagagtctgttaaaacaacgcttgaaaacgacaaacttacgatggacatttatgtaaaatcagatggacgcctggcggaaaactgggatccgaaagaaaatacgtacgatccaacgtatttaaagaaactggaagggctatttgaaaaaacggtagaaacacaagtggaccaaatcgtcaatgacatgcaaacaaaatacgaggccgctccctttaagcttgttaaatatgtacgcgtacagcaatacccattttggaaaaagaataaagacaactgggatgaagtcttttcagaggcgacagtccgcttccatgttgatttgacgattaccgactttggcattagggggaaaaggcaataagtgtgaaaaagaggacgtgttcgatagaatcaagttgacatttacggagaggggagaacacgttcaagttaatatcgttctatgtaaaggcgagagaagcttaattcactattattctacaaagtgcgacaaaaacagctaattgaatgatgttgggaaatatccaaattccttacaattcgagaaaattccatttataatagaaagcaacatacttggtttggggtgatcggatgtctacggtagtgcaggcggaaaaagcgggggcgaaaatcgttgactggtatagttgcattatttcgcggtcaatcgaccaagcgattctccttaaagaacaagccagcgccctcgtaaaaaacatggagccaaatgacaagattttagcgtactattcattagtcgaatttcgccatgaaatgctgctcagacaaaacgcaggaatggaagaagaagaacggttttcgaaaattgaacctatcctagagaatacagtcgaccatttactcaagtacctctattatttcatcagtgggcaaaatgaatacatcaatgaacgttacaaatccgcgatcaaactgtttaggaaagcagagcgtttattagagtatgtcgatgacgatgcagaagaggctgaattttattattacgcaggagccgtttgttaccgactaaaccaatacccttttgcgacctcatatgttgagcaagctaaaacgatctttgacagtcttgggtatgtggataagggtttgaactgccaaatcataattgctgcaactaactccgaagtcggaaagtatgaaaaagcggatgaaatcttaaaaaatgctttacagcaagcagaaatgcaccttgaaacgaaagcgctcattcttcgtaccctcggactaaatgcaatacggaaaagggagtgggaagaggcagaacattatttcaagtccgccttagcgattaaggaacaccgccaatcaccagtaagcatgaaaagccaatacaatttggccaacgtcttatttcgtttacagagggatttggaagcgcgggagttttttaaaaaagcggaagtaggcattctttattacagaaatacagaatattcggctcggtctctagtcacaaaagggctttatattgaaaatggaaacttggcattagtcaataagggcatcgatcttctaagagaacactctttagagtttgaaattgctgaagtggctgaagagacgtctgcttaccttgaaaaagcaggaaaatcacaagaagcattgaagtatatgaaagtcgcttacgaagcaaagctaaatcaaaatgcactgggagttgatcaagcatgaaaaaacttctcttgactttagtgttggtacttgcctttactggatttcaaggtcttgcacagtcaaatgggaacccaattcaaccacatgataaaacagacattgcaagttaatttttttagcaagagaaagcctaaatagcaaaagcctgaagatgcctgtagattgaccgtttacaaccaagaaaaccaaaaatcaatgggggtcgatcaggagtgaaaaaacttcttttaactttagtgttggtactagcatttacaggaactcaaggcttggcgcaggcaagtgatgtggatgtatttcaaccggatggtattagttaagaagttttttcaatacaaaacgaaaatgcctgttacgctctccatggaagctgttctcggggctcagtatgttagaaaatacgcagtatactaaaaaaacaacacagttatagaaaaacagatggccggatagccatctgtttttttgtattacccaagaagttgaagcacttgttgtggcgcttggtttgcttgagcaagcattgattgagacgcttgggaaagaatgttgctctttgtgtattccatgatttctttcgccatgtcaacgtcacggatacgagactcagcagcttgaaggttctcagaagagttgtccaagttagagatcgtgtgctcaagacggttttgcgcagcaccaaggttagaacgttgttttgatacttgtttgatcgcatcttcaactgcagctagttgtgtgtcaaagccattctcagcatctgggtcagtgaaagttgtcacatcgatatcggaaattttcaatccgtcatcgccctcagtaccaagagcagttgcgctcatatcgccaattgaaatcgtgatcgtttgtccttggttcgcaccaatttggaaagtgaaagaagcaggggcagaagcgccagcgtcatccgttccgcctttcaacaaatctttgccgttgaatgcagtacggtcagaaattcctttgcttccatcagtcatgccaccgatttcttctttaagcgagttgatttcatcttggatcgcttgaatgtcttcgtcttggtttgtgcctgtgtttcctgcttgtacaacaagttcacgcatacgttgaaggatgctgtgcgtttcgtcaagggcaccttcagctgtttggataagagagataccgtcttgtgcgttacggctcgcttgatccaaaccacggatttgcgcacgcattttttctgaaatcgaaagaccagctgcgtcatcccctgcacggttgatacgtagaccagaagaaagcttttcttgtgcttttgcagcagcaccttggttgatgccgagttggcgatgagcgttcatcgcagacaggttgttattgatgatcatagtcgtcacacttccttttgttttttgttacctcatccttgaggatttgtagaagcgctgtgcttctaatttttttatcggattgtctggagaattgtttacaggcttttgaggatttttttgatcagaccttagtctcatttaaatttattctcaacagggaaaagagagtaagaaattaatgcgtttaaatggctaaaagtagctttttccagcttaaaaatagaagaaataaaaaataaaatctttgtaataaaggtagatggaaggtctttggaagtggtaaaatagttttgcttgatgcattctgacattaatttaatatgtatttatgccttcatgtcatatttgtctttttaaatagaccaaaagaatggttttatgtcatgattctaaaaaaaaccacaaaatcctttaaagttagtgtatattagtcaataatcgacattttttagccgatataagtagaatgggttcggttacgccttctttaccgttatcaaggaaggtactcggctatgctaagggaagtattattccttaggcgcttgtcgccgtcagcatggtgtgaggggaggttcgatgcctcaagggctaagcccaaaatactacagcgaattgaaaagatagaaaaacgcttacatccttggcgcgtgagcctttttctatcttttttattttgtcaacacggagggattcaattatgtcaaaagtaaaaaaagcgattatcccagcagctggtcttggaacgcgcttcctgccagcgacgaaagcaatgccgaaagaaatgttgccaattgtcgataaaccgaccatccaatacatcattgaagaagcaattgaagctggcatcgaagacatcattattgtgacaggcaaaggaaaacgagcgatagaagaccattttgaccattcatttgaactcgaacaaaatttgttcaacaaaggcaaactcgacatgcttgaaaaagtccaagcttcatcaaaagtcgaactccactacatccggcaaaaagaaccaaaaggacttggacacgccgtctggtgcgctcgtaagtttattggcaatgaaccatttgctgtcctcctcggcgacgatatcgttcaggcagaaacgccaggcctcaaacaactcatgaaccaatacgaccaaaccgaacgctctgtcatcggcgtccaacccgtaccggaaaacgaaacgcaccgctacggcatcatcgacccagaatcacaaaacggccgcctgtatcgagtatccagctttgttgaaaagccaaaacaaggcacagcaccatccaacttagccatcatgggccgctatatcctcacaccagagatttttacgttcctagaaaaacaagaaacaggcgctggtggcgaaatccagctaaccgatgcaatccaaacattgaacgaacaacaaagcgtctacgcctacgactttgaaggcaaacgtttcgacgttggcgaaaaactcggcttcgtcctcacgcaattggaatttgcgttggagcgggaggaattgagagatgcgttgttggagaagatgcgggagtatgttgggtgctttactcctgtgagtaaataaacgaagaaaggggagccgtgatggaggcaactcgtacagaagtcataagaaaagagaacgaaaaaaaaacattagacatacaaattaatgactccatcgggtatttatttataaaacggacactggatattgtggcttctttaataggaatggtagtacttttcccgtctttggtgttggtcgctttacttattaaaattgaagacccaaagggaccgattttttttaagcaaacgcgggttggcaaagatggtaaacagttttcgatgtacaaattccgttctatggtaagtaatgctgaggatcttctagaagatttgctcgataataatgaagtgagcggtctaatgtttaaaatgaaagacgatccacgcgttacaaaagtaggcaaattcatccggaaaacaagtattgatgagttgccacagcttttaaatgtactaaaaggtgatatgagtctggttggtccaaggccgccacttccaagagaagtggctgagtattctacatatcataagcaacggttacttgttaaacctggatgtacgggagtttggcaggtaagtgcgaggaatagtgtcgggtttgaagagatggttaagctagatctcgaatatatggaaaacagaaatattattttagatctaaaaattatttttaaaacagcagttatcctctttatccccaataatgcatactgattaaattttagaaggggatttattaatgaaagttaataaattggctctaaaaaatattgttcaattaagtgcagttcaatttatcaactatatatttccattagtgacattgccatatatgctaaggacgatagggatgtctaattatgggttaatatcgatcgcactttcaattaatgtgattttaatggccttatccgattatggtttttctttcagtgcaacaaaagaaatatctttaaaagaaaaagtggataataggttagccagtacaatttattggtataaaattatgtttggacttgtaattctattagttggggccattatcataagtttattcacttttgatcttagatattatttgttcttcttagggttcttcttatttttctattctcaatcgatgataccgaactggatgtttcgtgggctaaataaaatggagtatatctctgtgcttacagtgttatcaaaattgatgacactatgttttttagtaatcttcattaattcggaagaagacttctatctaatggggttagtttatggtataccaacaataatttcttgtatgttagcacaatattttgctcataaaaatggttttagactagatagggttaaattcagcaatatcgtcgacgagttaaaaaaagggaaagattattttatttctaacgcagtaggtatattatatacatcctttaatgtaataattgtttcaattataggtggcagtttagctgcaggaatttatgcaacttgtgaaagaatagttggagtgatcaatagcctcacaaatgccgtttctcaagctgtttttcctattgtttgtaaaaaaagtgaagttttacaaaatggtaaagataaactgatggtatcagttaagtattttggctggtgggtactttgcacatctttggctgcaataatgattattgttttggcaccgtatatattattatttctcactggtgatgaagctagtagtttgcaaattactactttgcaagttatgtcttttgttcccgtacttatttcgctaggtcatttatttggaatacttactttgataccaatgtcctttcaaaaacaagttaggaacgcagtttttatgggggcagcagttaatatgactttgggagtcaccttatcttacacatttagtactattggtactgctttagctattcttttatgtgaagctactgtagtcataagagaatatattgtggtgaaaaagatattgggaagaggtaattatctgtgaagaagttttttgtattgactgttgtttataatacttcattatataattctctaactataaatggagtattggaatatttaaagagaaaagcaaacaaaggcattgaaattgagaaattttttgtattcgataattctacagatgaaaacttacaacaattaaacaacattgatgctgaaaaaaataacattgaatatttatcatgtaatcaaaatataggactagcaaaagcatacaatgaaacaattaaagtgatcaacgatagatatccgaattctgacaattggttgatgataacagatcaagacacttacttaaacgatcatttgtttgttttgttagaagaggcaatatcgaatggaaacgcggatatatatatacccagggtgcaaggaaaaaaacatatgatatcgcctttgaaagttaatagaaagaagaacagggatagttttgacttgccagatcaattaccaaaaggtctattaaaggggagatatactgcaataaatagttgttctgtttatcgggtttccttgcttaaccaatttaaaggttttaatgaaaaattcccattagattatcttgatcgttatatgtactatttatttaataagtctggtgctaagttatattgtcttgacattgatattaagcatgaattatcctttgattcatttcaaaatgttaaattcccaaggtacaaaagtttcctagtgagtcaaatgaattatgttaatataacaacggaaggtaagaaattagaaagatatagtaacttattacataatttctattggcatgctagaagaacattattgaatagacaagttgggctttttattaaagggagtattgtcttcgtgaggaatttgtaaaagttgaggagagataattaatttaatggagcacataagtaaactatcttctattttaattattactattttgctagggataacttccaaaactttgtttatccagttatctatttttttaggagagagcttttatacattactatcaacaaatattcttataattattttgttagtcttaatctatatgaatgaactcttttccaaaaaaaacacttttaatttaaatataagaagaatatatattggtatgactgttttattagtcttattagcgttttttataatggcatttattaattctggagaagggttagaaaaatttatatcaacgctttccttctattattggataatagttggcctgacattaatttacattaagattgattgggtagatgttcatttaagtaaaaaagcgtttactgggataattttattccagtgtattttagggattagccaagcaatattaaataaaccaattgtgaatactgcaatagacggtgtcccttatgtaaatgctatctattatttaaatggatcaagtagttcttatgaatacttttataatatgggtgctcaagttagagcatttggtctttctgatagtggactaacattaggactattggccttatcacttggatgtatatatttatataaaattaagacgccttggagtactattttactcttactttcaatcgtaaccattgtnnnnnnnnnnnnnnnnnnnnnnnnnnnnnnnnnnnnnnnnnnnnnnnnnnnnnnnnnnnnnnnnnnnnnnnnnnnnnnnnnnnnnnnnnnnnnnnnnnnngtattggtaaattttataaaataattaagcaaatcaataatggtagaaaaggtatgttgggtaatttaaattaatagataaatttggagaagttgatgaaaaatatagtatatttacacgctggagccgaactatatggtgctgatatagttcttttagagttaattaaaaaaatagacaaaaaaagttttaatcctattgtcattctgcctaataaaggaccacttgtgggagaaataaagaaattaggtgtagatgttagggtagtagattaccctatattaagaagaaaatattttaacttagctggaataattaattatgcaatcaattattttaagtcgctaaagaagataatagcgttgctggaagtggataatataaaggttgatataattcatgtcaacacattagcagttttagaaggtataattctaaaaagaaagttaaaatcaaaaatgatttggcatgttcatgaaattattgaaaaacctagggctataaacaaaatacttacaatgttattggggaaattctccgatagaattgttacggtatctaaagcagttcaaactcatttaaatagctctggtaatttcagtgaagggcaagtaaaagtgatttataatgggatagatatgcaaaagttctcaagggataaggatactagttacttgaaagaagaatttaatataccccaagatgctatggtggttgggatgattggcagggttaatgcttggaaaggacaagaagatttcttaaaagcagcagaaattcttttaaaagaaactaaaaatacttattttgttttagtaggaggcgtttttcaaggagaggaatggagatttgataatttaaactcttatattgaaaatatgaagtataaagataaagtgcggtttataaattatagggcagacacccctaattttcatgctttatacgatatatttgtattaccaagtacttcgcctgacccgttaccaacagttgtactggaggcgatggctagtcaaacaccaattgtgggttatagacatggaggtgtttgcgaaatggtatcagaggaagaaaacggtttgctagcagacgtaagagatacagttgatttagcggataaaattaaaagtttgctttacgataatgagcttcgggagagttattcaattaactctgagaacagagttaagactttatttagtttagaggcgtatataaaaaactttgaagagctctattttgaagtattatgagggagggtgattacagtgattgtgcaactgataaatatcctttctcgtttttttagtttatttataccaagaaaagatattatggtgtttaattcttttccggatttaagtgacaactcgtatgcaatttttgagtatttaattaagaatcaacaagagttaaacagagtctatacatttgtctatctttttaacgataagaaaccttccaagaaggattataattatttactagaaaggggaatctctattgaaaaattaaagaatgttcgttttgaaaaaaaaatgtctataaaaggtttatattatttttgctctgcaaaatatgtatttagttcacatgggattttggagaaaatcaacttaaaaaatcaaactagagtaaacttgtggcatggaatgcctataaagaatatagcaaaactagatgggaaagcagtgaatgaaatacatgtaggggacttttttatatccacttctagcttttatagggacatcatggccaaaagttttaatgtatctatagataaagttaatattactgggcaaccaagaaatgattacttatttcaagcaggagaaaggcaaaagattaagctaagaccttttatattatggatgccaacatatagaaaatcaagaagaggcgacattagattagatggctcctactctgagggtgatttttttgatgcagattctgtagaatcaattaattattatttaaaagaaaatgacttacttttactgcttaaacttcatccaatggactacgctaaatataacatctataaaaaccaatctaacatactatttattgatgaagattggttatttaaaagaagtattcaactatatgaactaataaaggaatcagaggctctcataacagattattcttctgtttatgttgactatctattgacaaaaaaaccagtggcatttatacaacctgatctaaatgattatattaatagtagagggctagtctttaattcttttaatgacatttttattggaactaaagtctcgtcttcaatggaacttatcggtttttttgaaactgtaaagcataaagttaatttaaatgaggaagcacaagaaatgctaagcgataagttaaattattataaggacgggcattcaagcaaaagaattattaaagacttaaatttatttaaatgagtaataaggaaggtcaaaatgataaatgtattcataattggttcgaaggggattcctgctaaatatggcggatttgagacgtttgttgagcatcttactaaaatgaaaacaactgacgaggtattttataatgttgcttgtctttcggaggaagaaaatgaatttcaatataataatgttagatgtttcaatgtaaaagtacctaatataggcagctcaagagcagtattgtatgatattaatgcgattaaaaaaactatagtatatatcaaagaaaagaaaataaaaaatgcgattgtttatgttttggcatgtagaatcggaccatttataaaaagatacaagaaacagttagcggcgttaggagctaaattgtatgttaatcctgatggccatgaatggaaaagaagtaaatggagctatcctatcagaaaatactggaaaatatcagaaagattaatggttaaacatgcagatttgctaatttgtgattctagaggaattgagtcttacattaaaaaggattattcagtttataatcccaatacgacttacattgcttacggtgcagattttttagaatcaaaaattagtgataatgatcaagtacttttaaattggcaaaaagaaaataatgtatctcctaataattattatttaatcgttggaagatttgttccagaaaataattatgagttgattataagagaatatatgaaatctaattctaataaagacttagttattatatcaaatgtggaagataattatttctataaagaacttttaaagcgaactcaatttaaacaagataagcgaattaagtttgttggaacggtgtacaatcaagatttactcaaaaaaattagggaacaagcgtatggttattttcatggtcatgaggttggtggtacaaacccttctcttttagaagcacttgctgctacaaaaataaatctcctattagacgttaattttaacagagaggtgggggataatggggcattttactttaataaggaagaaaacaatttagccaaactaattgacaaagctgatcatttatcatattccgaggtcggggatttagaactaaaggcaaaaaatagagttaagagtgaatactcttgggagaaaattgtaacagaatatgaagaactttttcttggtgaaaaatggaaggaaggtaaactatgaaaggtattatattagctggtggcagtggtaccagactttatccattaacccgatcagtttcaaaacaacttttgcctatttacgataaacccatgatttattacccactttctgttcttatgctagcaggaatcaaagatattcttatcatctcaactccagaagatacgcctcggtttgaacaacttttaggggatggaagtaatttaggtattgaattaagttatgccatacagccctctccagacggtttagcacaagcatttatcatcggtgaagactttattggtaatgattctgtagctttaattctaggtgataatatttactacggtcacggatttacaaagatgctggaacgtgctgcttcccgtgtagcaggggcaactgtttttgggtacaatgttaaagacccagaacgatttggagttgtagagtttgatgagggtggaaaagccatttcaatagaagagaagcctttaaagccaaagtccacatatgctgttacggggctttatttttatgataatgatgtcgttgaaatagcaaaatccattgagccttcagctagaggggagttagaaatcacatcggtaaatgaagcttatttaaagcgtggcgatttacatgtggaactgctagggcgtggttttgcttggttggatacaggaacacatgaatctttgcttgaggcttctacgtttattgagacaatcgagcagagacaaagcttgaaggtggcatgtctcgaagaaattgcttatcgaaaagggtatattacaagagatcagcttctttgcttggcggaaccactaaagaaaaatgagtatggccagtacctcattcgccttgctaatcaacttcaagtaaatccattagagggtgttactatatgaaaaaaatagaaacgaaattcgctgatgctttcttattagaacccactgtttttggggaccatcgcggcttctttatggaaagctataataaagatacgtttaaagagatagggattgaaattgattttatacaagacaatcactccctttcacaaactccagggacactaagaggtttgcattatcaattagcaccaaaagcacaaaccaaactgattcgagcaacaaaaggcgcgatatatgatgttattgttgatattagaaaagagtcttcaacatatgggcaatggcaaggctttattctaacggctgaaaataaacggcaattgcttgtaccaaaagggtttgctcatggtttttgtacattggttgaaaatacagaagtccagtataaggtagatgaactatattcgccagagcatgatcggggaattgcttgggatgattcggtattgagtatcgactggccagtttcgaaccctattttatcggataaggatgtaaaacacccaaacttagaacaggcagaaaataatttttgatgggggaatagtagagtgcatattttaattaccggcggggctggatttattgggagtaatttcgtaaagtacatgctaagtaagtatcctgattaccaatttttgaatgttgatttgcttacttatgccggcaacttggaaaatctaaaagatgttaaagagaaggcaaattatacatttataaaagctgacatttgtgataaagcagctatgacgaaattggttcgggaacatagtattgatgtgattatcaactttgcagcggaatcccatgttgatcgaagtatcactaatcccggtgctttcgtacaaacgaacatcgtagggacgcaggtacttttggatatagcaaaagaacaaaacataacaaagtatcttcaaatttctacggatgaagtatacggaacacttgggtctgaaggttatttcacagaggaaaccccattgcaacctaatagtccttattcttctagtaaagctggagcagacttgttagtgcgtgcatattacgaaacgtatggattgaatgtaaatattacaaggtgttctaacaattatggccctctccagttccctgagaagctaattcctttgatgatatctaatgctttagagaataagccgttgcctgtttatggtgatggaaaaaatgtgagggattggcttcacgttgaagaccattgttcagcgattgatttagtactccataaaggtgatgctggagaagtttacaatgtcggtggacataacgagagaacaaacattgaaatagtcgaaacaattgtggaggctttgggatcgtcaaaggaattgatcacttttgtggaagatcgtttggggcatgatcgtcgctatgcgatagatccagaaaaactaacaaaaaagcttggttggaagccaaaatatacgtttgaaacaggaattaaagaaaccattcaatggtatctagaaaatcgtgaatggtgggaacgtattaagtctggcgactatatgaattattaccaacaacaatatgcaggtaagctcaatgtctagtcgtgttctaataacaggagctggcggtcaacttggccatgatcttgtcagtcaattttccttaaatgggtatcaagtatttggtttaactcgtcaagatcttgatattacagaccaagatatggttaaaagtgtttttgaaaagattaaacctgacttagttgtccacgcagctgcctatactgcggttgatcaggcggaaagtgatgtagatgatgcatttcgtgtgaatgcaattgggacaagaaacgttgctgtagaagcaaatcgctataacgcgaaagttgtttatgttagcaccgactatgtatttaatggacaagctagagagcctattaatgagttttcccctgtagcaccaattggtatatatggtcaatcaaaacttgctggtgaaaactacatacgtgatttgtgtaatcaattttttattgtaagaacttcatgggtatatggatcacatggaaataactttgtcaaaaccatgctcaagcttggacaggaaaaaaaagaaattggggttgttgctgatcaaattggatccccaacctatacagtggacttagctaaaagtattgtagaaattggtgcaacagaaaaatttgggatttatcatgtttccaatagcggtagttgcagctggtatgagtttgccaaagctatctttgaaataagcggaattgatgtaaaggttaaagcattatcgaccgaagaatttccgagaccggcaaaaagaccagcttattctgtgcttgatcatatggggttgaggttgaatgggttacaagaaatgcctgcttggagagactctttaaaaaattatctgcaaacatatttgtaaccactgtttgatttcacgtgggtggtaattgggaacaaggtttcagtgaaacgaatctactcgcggtcatacgtagacttcaagcggtttaacagtccttttttccataaggtagacaagcagacagtatatgcaactataacacatggtgttaataaagaatccttactagcctctggcaaatattagagcgaatagaggagtatcggtacagaggcataggagggtcattattcatttgttaaagcttcagacgcttacaggttacagaaattttattagaattaacgcggagtagcagtcgaactttagattgatcattttagttaaaattaatagacagggtaaaaaaacaaaaaataaagttggcttaaatgctcaagttgctggattgacattgagagaaaggttaatcatattaaagcgattaaagtgaggtgagagagataattgaatagacatcttgaattgattcaagtgttaagaggattagctattttcttagttatgttttttcatgctaactacatgttcaataattcaaatggctactctttttgggggattggagaatggactggaaggtctggcggtttagatttgtttctcgttataagtggtgcaatgatttattacatttataatgtagatattggggtcaaatctaaaggaacaaaattccttaagaaaagattattgaaaattattccgttgtattggttggcaactttcggagggtttctcctagtatttattttaccccaacttggagatgagaaacacagggacatctttaacacattaaaatcattattctttcttagcgatgatccggttgtcggcgtggcatggtccttaagtcacattatattattttatgttattttttccattttaattgtaaagcctagagtagtagggggaataatttcagtttggctcctaatttccatgttggactatttattaatttttaatctcccttttagctttttgtttgctattgagaatattgaaatttggtcaggggtcttagttgctatccttattaaaaaaggatatgctactgataaacggacatctattattatattagttactggtattcttgtatacttattaatttggtttaataaaagttctaatcaggtggcattgaattatgaattaatatgttattgtgttggagcgatgttaattgtttattcagtgatatgcattaatttaaatctcaatttaaggtctaaacaaaatttgactaagacattttctttgtttgggaacgcttcttatgcggtttttttgtctcatgtccaatttctcaatttatttattgtattatttaataagtttttttcaaatgctggattaagcgttccttttattttagtgctaataatgatttttactcttttatctggaattttggttcatatttttgttgagaaaccattaaactcttttataaaaaataagaacgtgtcttttattaagttgaacaaaagcgataaaattgcataatacacaaaatagttgtattggtgttccaaggtgttgttgtagttagtggtttaataattatagttaacttctagaagaataattcttatcatttggaagttaagagttagaatatttttgctctccttataaagactcatagagaggtccgctgttgattactcaaggcgcagatacagcttttgtggtaaccgagtgggatgagatttgtgccctcacgcctggagattttaaagcgaatttaaaagagccggtagtgtttgatgggcgcaattgctttaacatcgaaacgatgaaagaagctggattgaattactattctgtggggcgtccagttgtaaagacggagaaagagttagtttgaaataaaccgcctgtatgtctagcatggaccgtacaggcggtttagcttggtctgttgtgaatgtttcttctgtctaaggggggaggcatgcggtatgatactacttcttttactgatggttattcttttcttcggaatatccactctactttttattggaaaaggcgattttttaattgccgggttaaatgccatgagcgaagaggaaaaggagaagattgacacattcaggttgaataggttcatggggaaaatgatgtatgtgatttctggtggaatgctattgctttttctctatcgtttctacaactcttcccttgtattggcgctggctttgttgcttctcgttgtaccgactatttttattgctatttttacgttcaactttgatcgctttcgaaaataagacaatggcggtctaatcattgcgtacgaatgatcctaccttacctatactttaatgcctctacagtcctttaattatggctgaaattaattttttgtctctttccattagccattaaaaacacccaccaaaaagttcccttcaaaaatttttaaaacggtacgccgacaagtaccagaaacaactggattatgtgatagcttttctctatagtcagctaatttcatgattgtagaaggaggctaggcaatggacgtatattatataagactttcattggcggaaattaaattggaccttctttcttttgcttatcaggcagcgaccagtgggtctgatgaaatcgagcattcgggagagcaactaacggccatcgtaaaaaaagttgatcagttggacgaggttttggaacgtgtgataaggaaaaaggagattgggaagatacgtgatgaataagagctttcgagcgaatggtttctcgaggtaaaactttattaaacaccgtcttgagagtactagaatacaacgtctatgctatgcaaaaaagctaaattctcgataaggtgactggagatttagctttttctttcttctatggaagtgttagtcaagttcgattgtataagcagtccgcctagctgtctctgtgcctaatcttttcccaacgacgtgcaaggccatttgaatccccgctgaaattcctgctgaggtgatgacatttccttcatcgacgtatttaacgcctcttacaacttctacatcggaaaagtgtttttctaacaaatttaacgcagctcggtttgtcgtcgctttttttccgttaaggatgccagcttgtgctaagaaaaaggcacctgtgcacacagaagcaatcgtcttttgctcgtagttttttatccaacgaatgatttcttcgttattctgtacaagctggatggcttttagaggccctccaggaacaatgacaatgtcaaatgcgggtgcatttgaaaacgagtaatctggcgttacttttaatccattatgtacagtaatttgccttccgtcttgggaaacggtacttactgtaaaaggtttttccgtcaagttgttcgtaaacattctttttacatcctcgctattatatgtggttaggttgaaaacctcatatggacctgcgaaatccaacgcatccacataatcgaatagcaatattccgacatgctcgtttttgctcacgtttaaccctcccctctttatactataccccggtagtgtataaaagccaacctttttatcattcatacccagcttttcttaatcaaacgtttaattaaagtggtcataggaagcaataaacgctgttttgggaatagaggctgatcaattaaaaaagagccaatgatggctcttactggttgtaaaaccgattgtccgttgcataagtctttcccacccgcaattccagcacacactgttcgcaaaaaaaaattcgtcatgtctcaggattcatccttgccataattcaaaccgaagcggtaagcttgatcgagcagcctttcgtaatgttctggctttgaatcgagtgtctcatataggaattcaactttggagttggagataccgcaataatcggcaatgcctacattgagcaaatgcgtcatcttttcatcataatcgcgctttttcatctgttcttttgaaacgccggccaacccaagccataacacatgctgatggtgaagatggctcgaaccgtacgcaaacccattgttaaaaacgcgatcaatatacccctttagcatcgctggcaaatgccaccaccaaattggataaataaaagccaacgcatcatgcttctttaaccgctttatttccgcttccacttcaggcgagaaaggctgctccgccacggtccaatcaggttcatctatcccttttaaaacagggtcaaaaccactttcatgtaaatccaacagctcatactcatgaccggcgtcggctagcccttgtgcgaaacgttcagcgactttaaaggtcaaggaatcctttcttggatgtgaaacaaccgttaacacgttcatgcttatatcgtcacgacctttctcaacagctcatatatagccatccataatggctgatgctattataaacagtaagaaaacgatctggaagtacgtactttaaagtgctataggaacatcaaagtaccctaggtgcatttcatggaaatagacctttggcctaaaaatgagtggttgttccaagcaaactttgcctttgaacggaggggaagagatggctgaacagacggaaaaaagcagtcaaaagaagtaccacgttggcgtggaagtggctttagaagtaatgggaggcaaatggaagccgttaatcatttaccatttgatgacagggcggaaacggacatccgagcttcgccggttaatccctggcattacccaaaaaatgctgactacccagcttagaggcttggaaaaggatgagatcgttacccgaaaagtttacaatgaggtcccacctaaagtcgagtatgaattaacgccctacggctggggactaaaacccgcacttgaccatttatgctattggggagaggatcacctggaaaaggtgtatggagacaaatcgaaagttttggaagaattttaaagcgctatagagtaaattcaggagtttagaagatagaaaagccttcaatcggaggctttttttctttgtagaaaatggaatggtggaaataaaatgatgctgtttaattcatgaggggagagtaggtttgtccataatagagtggacacaatcactgttcgaaaacgatgaagaaaagtaaacttacagttattgaaaatccaattcatgacaaaaagagggttgttttatatccatacccttatttaaaatagaggggtatgaagcaatttccatttaatagaatgtaagattgttagccaaatgttatcaaattggttaaatgaaacggctgaagtagacaaagcgcgaacgatgaaaagagcatgttaaatttactttactatcgtgtctgttgtcgtttcactatgaagatgcagcgccttcgacgaaaggagcgaaggtaggaaaggagaggaaacaacggtgcatgaacgaattgtacgcctaaaaagccggaacaatgaattaagagcccgtgtgggggaggcacaaggaaatatagaacgtttggaaaccgcgagaacgacgatatcggaagagaagcccaatgtccaagacaatcgtgaaactttgacacgcaaggctctcgatggcgatgagtggcggggaaatcgcaaagaggagtacgaagggttaagggatgacatcaaggcgaaattcgatgaggctgaaagtcacattgagcaattgctagaagatatgaaggcgaagaaagcacagctgcaatcgagcattgagacgatgcaaaacacgatgatgttgaacgaattactcataagagaagagagggaaaaagcccgtggctgagattttatttgaaaaaagcgatgtagaagagaagttctcgcaattgaaaaatggcgcaaatgaatttcccgccgacttcgaacttccttctattttaacaagtgaactacgcacggttgagcaattcaaagaagtcgaagaaatgtaccatgaactgatcatcagttatatcgctgctctaggaaaaggagcagaaacagcatggaataatatccaaacattaggggaagcggatgaaaagctttcgcaaagtatgggctcctaacacctagatggactcattgtctaaaggttgaaggatcatcctcattcattcactgaaatttcatccttttggatattaagaaatggatggaaacaatcaaaaccgttcacatacaaatcgttttaagagggaaggaggccggaaatgattctcgatacgaatgaactgatcacggaaatcgaacgtgcgattgaacaaaaacgagatcaccgggaccaattgcaaacgcttcaatccaaagtagaagccatctgtcacttagaaaccctccaaggagagggaggcgcagcgatcaaagactacttcacaacgctgcacttgcctgtactattattcttccaacagtttatcgaaacgcatattagccagcttgagacggtgaaagacaacttgctttcctatgacggcgatgccaatacgcttgtccggacagagtttctgaatgaagtgaagatggatttgaaccgcgtcatcaactatacgagagactcggcgaacatcattaacagcgcatacgaatcggtgagtgatctgatccacacaggccgctgggagtcatcagccctaacagacaaagcgagagaagcgagggggcagattgaagacgcggaagaccacttagaggaaaccgaccaaaacaatcaaaccgtgctcgaaacttccaaagccacgctagaacatctcgaagccttggtacgcaaagtcgaagggtggacgacgaaagaagcgatgctttctcaaacaacactcagtgatatttccgcctatttccaggagggcgaagccgttctttccttgttgggtgtagaccatatgaatgatctactagataaaatgctagtgggagtagacggggaaggattaacagatgttgaacatgcactgctttatcattatcttcatcgtgaagtcattcagggagtatcgagtctagtaaaagaagacacagcaggattgcaagaacgtctgaactatgaagtgcttgtctcagacgatgcattagcaaaagaaattatgataatggagttttatatctatgcgccagcagtcaatccagcgctgtctaacgaccccgaagagcaggcaatgattcaggcgtatacaagcacgttaagaaaccatcaagcttcaattgcgcatataagaaaggatcacaaccatcttgatttagaaggaaacccattgcgcgcatttgtaagcaaactggaagtgaaacaggaaggaaatgcgtctgtgtcaatacattcccgtttggcttttgatattattggttcaagtgcagcaatcccccacgatcaatggatagagagaaaagtgtcacctcatgtagataagggaacgttaaagcagcacggaatgacaaaggaagcgtatattgaagaaggacgacacttattagaaccagggatcgtccagtcagcatcagaagttactcattataggggacaaagtgctggttttgcattcagtcgagtccatagagaagaacgtaaagaagaccttcaaaatttcacagcgaatttcgtcattggaaaagtggtggatgcaacagtgggaaaagcggtagatgcagcggtcactgctataaaaatacctagctttatcgttgaagcaggaaaaattgtgatgatggttcccgagcacaatacggaaaaaagcgaagaagaacgtcaaattgatggagaggaaatagaagaagcagctaaactgttaaaaatggaggtaacggagtcacaacgtttggaaatgcgcactcaacctgaacctgaaatccagcttcatcctacccactatacagaagggatattagagaggtggcaagaaaaggcggaagaaagtgagaatattacgtacccaaggcgggcggtcgaaaataatgaatgggataaagtgtatgctgctttattacaacttaataaagaaattgacgaaattgattatgattacatcgttgggtagtcaagttaagagggagatataaactcaactttctcagatggaagttgttaaataagcgttgatattggataaggtggccattcagttcagtactcgatctaaaattgcttgattttgtcagccgttcgatggtgaggtaatagtttgtggacgacactgaaggtaatatgattggtgggcgtaggtggatactttcggataaatgaggaagcagaaaggggttcaacctatccaaagtaaaaaggcactcaataaagtaatgagagcgaacagaaaggacgatatggatgtggaggcaaagcaggtatatgtttggttatttatctttaggaacacttgctttaacgtcggcgtgttttcattcagaaaatgatgatttaaagaaagaagaagtgattacgcgtagtttggaaaaggcagaaacagttcagtcatactcattggagaataattttaaatactatgttcgtccgaccacggagtttgaggaacagtcgtttgttggcaaagttattgagtccccacgaactagctattttaaagccagggaagagtacggaagggaagaggaagaaattcgtaaagaacgctatctgggtgaactgtataccgcggatggtcaaacctatttgaggtctgaggaggaaggatgggtacgggaagaggaaatacttggggagtccatcctcccagagtacgaaaatgaatacgatattcctgaaaccctcttaggtatttttcagggtttagaaaacgtttccatggtagaagagcgaaatcattatgaattgctttacaaaggagacgacgaagaaatctttgaggttttttacatgcccgtagagtatacagaacctggaacctttacagatacgatagagtataaaaaaagagaagaggacctcccggaagtattcttgcgcattcgtaaacaggatttaactgtcgaagaacttgaagcaaagttttactatgaagacgccgactcttatgttgaaacagaaatcgactatgtatggttctttcgttttgatgatataaatgaaatcgataaaatcgatgtccctgatgaaatgtttgaggaggcggagcagaacgaataggcagacccctccttcccccttgattatcaagataaaacttactgaaacagaacagtgtttttttttacgcactaacatatggtttttcgctgtcattttggcgcgaaatcatgataatgggtttctctgccccagcaataatagaaaaagcggcaagtgatttacatatgaaagttcgtgtgtctacccgtcctactccgaacactccaaatcgcaatgaattacatacatagctatataggacagaggatactaagtattttcctgaaaatcgaattaggtatacgagtttgataatacgcttccctatctattaaagggagggggacattaatgtgaagaagttgatatattgcttatctttattgacattagcagggtgcggaactattaccgaagaggacttgattgtcggcacttgggtagcgacttcaggttatattgatggagaggcaacgggagagcctgattgtggccagtttgctttaggaatgcggtttgtggatgaaaaaacgctttatgtaggggaacctggtgaagaagaggcgtttgaatatgagattcgggatggaatagattattacggggaagagcgtcgtttcattgagttttttaatgtaactcgtaaagaggaggcactcaaagagaaatccgaggatgaagtgccaaaggaaatgtattcttttggttcgtttgcgattgaaaaggggggaaaggatgcctttggaatggagacgaggccggggaagtcagagggaaaacattgctatatggaacgccaggagagtgagtgacgtccctgttcctgcatgaagcaataaggttggttcatttaacgttgaaatgaacgaaaggacgatccagatgaggagaggcggacagaacgcctttgtctatgtgttttttggactgttgatttttatgtcagcgtgcaacacagacgcgaaagacgagcatctaacaacagaagaagcgattattgcgaaaacgattgagcaagccgaatcagtggagtcgtatgcgatagaaggagggatattagaagattttctatgggaggatgggagttcggagtataactatctattgttgtcgagtaataaaattcctgagctaacccacagtcaagtcgtacaagaatacggtattggagaatttgaaacgaccgtatttacatcagaactgtaccagaacgcaaaagagaggtatataaacctcgatgataagggatggaagaaatcagaagaccccaaggacattgaatatgattatactgagtatgaagcacccattatgtttttagaacaactggaaaacgtggacgaactgatggtagaagaaacggaagctgagtatgaaattcgctattctgaacccaatgaaactctttatgacatctatgagccgccttctgaggcttcgaaaaaggggaccgtctttgtagagactggcagtccagaagtgtttcttgtaattgataaagccgattatactgtccgggaatttacaacaacgttcttttatgaagatgaggcgggaagtgactcggaaggtacagcgacgctggagttgcgctttgatgatattaacgaagttgaggatttcgaaatccccgatgaagtgattgaagaagcggaggcaaatgagtaggcggggcaggaagggaaagcttgtgtagaagggaaggggttatttgataacccttactctcgccctaaaacggattaatacacattcagtacctattaacctttcgcatattaaagctaaaggtaagggcagtattcgtttgtaaactggagaaacaggaggaggcaaagcagaaaggacgatccagatgaggagaggcagacggaacgcctttgtctatgtaattttggggctgccgattttcatggcagcgtgcaacacggacgcgaaagacgagcatctaacaagagaagaagcgattattgcgaaaacgatcgagcaagcagaattggtaaactcttatgaaatcgagggaggagtttttaatgatattacctgggaagatgggagaatggaatacacgtattatttgttttcggcgatcgagacttccgaaccccaacgtacacatgctcatttagaagaaaaacagggaaatggagacacagagatcattttgagtacagaggaaatttacgagaaaggagaggacatctatgtaaattccgatggtaaaggctgggaaaaaacgagtaactcagctaactatgaatatgagatgacagaacatgaagtggcaattaggttgttggacagaatagaaaacatggaaggcgtaaacgttgaaaagacggatgagacttatgaatttagctactatgaagccgataaaacaatttatgatatctataagccaacttcttccgaaactgtgaaaggtacaacttttgtggagactggaagtccagaagtgtctttggcaattgatcagactgattacacgatacgggaatatacaatcaaatttttttatgaagatgaggcggggagctcagcagagagtgtgcttacaatagaataccattttgataatattaatgagattgaagacattgaaattccagatgaagtcattaaagaagcggaacaaaacgaatagcaaaaatgaagaagcgatacatagggagtaaggttaacagcctgttagaagaagtcactcaaaagatcaaccaatggcgaaatcgtatctccggccaacaaaaaaacgcaccaagtagcgggcatggtgcgtttttccgttaatatgggtttgaaaccacgtgctctgcacgtgtgaaaacgaaacttctagagaggtctagtgatgaaaaaatctccaatcgttataatagaacttggccgccaaaccaacttctatcaacgaaaccatttaaagataagtaaagtaggaaacggttggcggtcccttcagaggtccctttagggacttcgttggtaaagtgcccttatagggcgaaattaaaaccgccggttctaccggcggatacttacttagatttagtggctaggcgatcctgcctgtttcccccgccgtatgtttgctctctattcaacggtaatgtcattttttcgtcctctgtaccattgtaaaaaggaatgggcgagttcaaccggcacgtcattgattcctgaatggcgcacggggtttcctcgattggttgtctcaattgaggcgaggcccaaccttttttggaggatgtttcgagtgatctttgctttaatgactttttctcgttttgagacaaataaagaggtcgtgaatgcgcctgttttaaactggataaaatggtcgttgatcgcatagcgggtatggaaaaaatcgaacaaccttgcgatcaatagataaaccaaaagggctgctgatacgattatccaggactgctctatattgaaaatggcaggtttaaagtaaaataaagcaccggtggcaaggagccagaaccaactcggccgcaatatgcggagccacaaggattttgttggaagacgagtcatttctgttgtaatcgtgtaggacggtaacatgtctgatatcatctcataggctttgtttactgggagaaacggatagagcgtatttttttcgagtgcctcttctccagaacgtagccccccggcacttgttagtttgacttctgcgagtccgagaagtctttttaccatggactgttctatttcaatggcttgtaccttgtctttggaaatggaaaaggcagtttcgtcgataacgcctctgttaatgtaaatatgagtggcatctgaagcgatttcgtattttccatactttacatacgttcgaataagtccaaagatcgttgaggcgattatgagcacgatgatgatgatggctacaatccaccaggaacttgctagtttgttgatgagtccttctgtcgtatcttcgacatgaaaaagatcgttgattttaaaataaaatgaaccaattaaaggaatgagcaccaaaaaacttaaagatgtaacagatgcttttaaaatgtctctttttgtcggttgaaaatgaatcgtacgctcttgagcgggatccctgggatgcgcttcttcgtcatttggatcatgtgatggatgattccaaccgtctaattcctcgtcagtcgcccttttgatgtgtgcttctatctgttcagcttctgcttttgatagaacttcaaattttatatgggcattttcccctgtcatcgcgatttcaaaatgaatcgaagtccttttaaagacacgatggaggaacgaggtgtgacggttgatgttttcgatttttgaaaacggaatcgtttgttccgttttgctgaaaaggcctttgtaaaggtggaaggactgctcatccaacttgtatttatgggtcacccatttatagataatcgaaaaaaggatcaatccaactatgatccagaaagccattcgcccatatttaatgaaggcagattcggaaccggccatgacgacgtataaataaatgacaaagaaaaaagcatttcgtacaaggttgatcaagtgaaaaagcatcgtatatggagaataacgcttggcttttgtcattactccacttccttaattcttgcatattgggcaatttgattccgcaactcaactgccgcttcttttggcaatgcaggtatggtgtgagacgatcccatcgtttccacggaaacggaacagaggccgtattttctaagaagcgggccttgctcggttgcgactgattggatttttgtcatcggtacaagttcatgggtttcttttaatgcacctgattttagttgtaaatatgcttcatcgacatcatagcgccaatgtttgtaaagcaagaaggggcgaatcactgaccaaatccagccgataatcgttaacacggtcgccccgattaagagccatccaacccattctttccataaaaaacgatcatcaaggtaaaaaaggattcccaagatgatgagaacgatcatatttccaatcgcgtcactgataagccaaaccttgattgcatccttcgataaacgtttctgaggtgcgtttatggggatactcaaacaatcaccacctatattctatgcctattatacatcgctttaagtgccggttcatccatctcaatatgagtcgctattttctataaattaaaaccccttgataggaagtagaatcaactgtgtgttgattggcaagagacagtttagtaatgggaatggatgtatttagcacagtaatctggtaaaatatcattttccacaaaaaacactcagaatgtttcacttctgagtgcaattgaaatcaatatatactttttcaacaatcgctccctacttcagtagaccgcttaaattatcatttctttttcttttattcaacacgagcaggcttgtaatgagaattaaattagctatggaaacaataatactgccttcaaatttatatgtaccacctgaaatcaacaaacttccttgaaaagtattgattagaaggtttggataatcacctgccaaagaaacgccacccaatataattgccccaactgtattccaaatgaaatggataattattggtgccactattgttcctgtatactctaaaagtaacgttacaaatatgctcatcgaaataacattaatcactgggatcatacctgcttcaaatgcgcccccatgcatcacggtaaataaaattgttgttaaaatggttgccacaataacattatatttctgtttccataattgatataaataccctcttaccaacaattcctgcatcgcaacattcaacagtgatgccaaaatccaaatccatatgtaatcaacactgttttgaccctgtatattcatagtttttgtaagtaagaagacagttactacgctccctaaccacaagacacctaaaaccatacctattaaagaactttttaagaatcttggagctacaggaattgtaattttacccttttctacaataaaaacgaagacaactgacaacaaaaccactaccacaaggggtgtaaactcccaccataaccgtaaatacgcctgactgtttgtatgtatatcaggcgtaaatgatattaaaatggcccaactcataaaaaaaataatggtttttaaaatggtactggttaactttttcattattgattcctcttttctacctaagacaaactgtgcagtaatctggtccgtttgctgaatatcatacttttaatagcttaacacaaaaacaatatttctctaaaatggatagcaaaaagtactgaggaggaaggggaaccgtcaaagttaaccaaatgcctgaacagaaagaacggattaagagacgtaaagaaaaccaaagacttgcgatggagaacgatattttaaagcgagccgatgggtggatggacgcttggagtgagagggaacgcagtaatggataaaccgattaagattcgccaattactaggagccgctattgcttacgtgccagccctttttgtcatcagtggcctcagggctttctttgtcgggtttctcccgcgagcgaccataggattaaaaagatgaactcctttatgttatagaagcaaatgaggaaaacaagccctaaaggcaagaattctctatggtgtcgcactctatgtggttatatcgattgaaagtggctaaggctttagtatcccattctctgcatgtcggtggatgttgacatcaggaacaggtggtgcgcctgataacttagggcaatttatccatttaaaaagtgcagaacctgtaaaagaaccacagcgttctgcacgttatttatagggagggggcttgtagaaggaaagtgttgttaggtgaaatcctccttgcctgagaaagggggaatcgttgctcactattggaattggggcaaatccgttttgtgcgcttctagcatctcatccaatatctcttttgcttttacgtcgctcgtaattagcgggttgatgcaaagagccagtaatgcttgttcataagaacctgttacggccgcttcaatcgccactagttcaaatgatttgatttgttggatgaggccattgatcgagtaaggaagttctcctatagctaatggaatgggcccctgctttgtgacaatgcagttaacttcaacgactgtatcgttagggagattggtaatcgccccttcattgcgggtgttgagtgtttggacatcccctttatcgttgtaaatggaagaaattaaattacacgcagcatcactgtaataggcgcctccgcgtttttcgagctgtggtggctttatgtcaaggtcggggtctttatagagttcgaacaattcatcttctaattgcttaacgacttcggcgcgtgtcttaccttgtttaaactcttccaattccttttgcaagatttcgttcgttttgtaataatagcgatgatacgggctcggtatgcagccaagcgccttcataaacgccttctcccaagggagtgggatgatgtttttcattgttacttcatgatcgggatctgttactaagtcgatgacgtcattcaatctcgattcaccgtttacatggacgtcaaggccgtaggacatatggtttagcccagcaaatgtaatcgtcagttggtcaggtgggacgtctaataatgtcgctatggtcattttcgtgttgatcggtacattgcagacgccgatgatttttttgtgttgactatatttcatgaccgcttctgtgacaattccagcagggttggtaaagttgatgagccacgcatttgggcatagttcgtgcatttgttcggcgatctctaataagacgggaatggttcggagtgctttaaataaaccacctgccccgtttgtttcctggccgatcatcccgtgttttaatggaatgcgttcgtctttaatccgagcctctaataagccaacacgcatttgcgttgtaacaaaatcggcgtctttcaatgcttcttttcggtcaaaggtggtataaatagtgatcggcaggcccgcctttttcaccattcgcttcgccaagtttccgacaatctctagtttttcttttcctttttctatatcaactagccacagttcgcgaacgggaagctctttatggcgttttattaatccttcaacgaattcaggtgtataacttgatcccccgccaatcgttacgattttaatgcctttcttacccaagcagatcgcctccaaacacaaacgtcattaatgcgctcgtagcaaagccgacaataatggcgatgcgtattctttgtctatttaatcgtttgtccgttgtttttccgtcaattttcgttagtacaatgcctattccaatagctgcagaaatccctgcgcttagaaaggcactcatcgtttcagaaaggtgaatgtatttgagtggaatggaaaggagaagcattccaaaaaacaaaatcatcataaagacgaaaacacctttagggcttatgcgaggaattaatcttgattgctccacaagacaacctcctaatgacctaatgaggggatcggaaggatcccctcaggcccgtattttattgctcttcgttttgttccatcgcaagcatttttttgtcgtagattcgtagaaatggcaaataaatcacgacagatatggcaaggtttactaggacaagaataatggaacgccaatcgccacctgtcgctaaataggcgcctattggggccgggagtgtccacggtgcttttataaatgtaggcgatacaaggccaacagaagtcgctaaataggcaatgacggctgtaatgattggcgtgataataaacggaatgactaaaatcggatttaatacgataggtaaaccaaaaataacgggttcattaatattaaaaatacttggtacggcaacggttctacctagactttttaaatacttggaccgtgcaaaaatcaacatgacaatgactaggcctaacgttgcgccggagccgccaatccatataaaccattgatataaaggttctggggcgatatgcggaagttcacttgcgcctgatgcgacggcttcgccattttttaataagtatgtttcccatagtgggcgggcaacggaaccaacaacagacacgccgtgaattccgaaagaccagaaaaatgtaattaaaaatacgggtaccaataccccaaataagctatcgccagctgtgacgagtgggaccgttaatttctccacgagagcgtgcaaattgacgcccataatgattgtaataagcgtcatcagcataatgacaatcgcgacagggatgagcgcttcgaatgaacggctgacggacgcgggcactgcctcaggaagccgaatcgttatatttctttgtttacatatcctaaagatttcgacagatagaatcgaaacgataatcgttacgaaaagcccacttccacctagatattgcatcggcagcacaaagcctaactcttcaacaacagagggagtaatggtcaacagcaaggaagcgactgcgatttgaccaccagacaatgggtcgactttataagattgtgctaagttatagccaatgccgaacgccacgtataacgacatgataaacatggtcattcgataagggattaaaatttggtcagcattttccgtcgcccattgagtcattccccacgattcgggcaacggagggaacgcaataattaagaagaatgaaccgacgataataaatggcaaggaggagacaactccatcgcgtacagctaaaaggtgccgctgttccgcgagccttgccatcgggttagatactctcttttccaagaaatcaatgaatttccccatgacgttcgcctctctttttcttctttatttcactaattcttgaagcgttttcaacaatgtcggaccgcctagtggtgtataggcttgcggtggaattggcccacaaggaaccccgtatgcatctgcttcttttttaatgttgtcaaaacgatgtttgatttgcggcgctaccatcacgacatcccagttgttttctagctctgctgccacttcacttgaaccaatcgcttttacttccagggcttgtccatgtttttctgcttctttcttcagggtgttgacgacgatcgcgctagacataccacctgaacatacaaacaatacttttgtcatttccaatcatctccttcatgattttaaactgtgaagttgtcttttgattctttcttgaaaaggttttcacttacatgtattatagggttaatgaatgaagaaggggagtcgagatctgacttgatctcgactcccctttatttggatagatcggtatttcggtgaatgatggcgggcaagacccgccattttcttcagattgagggccaaccccagccaaccaagctccaccgtcaccttttccaacccgcgaaggtggaatcgtcgaaacccgagattttgtttggcatgcccaaatacactctcgacgtccgtttttctttgcgcgtagagtgtggctcctctttcactatgtagtttggccgcttctttggctttgagctcctcgtagatggggttgtaatgaatttggcgaggccccttgcccctcgtacagtccgctttgaacggacacccctcacaggactcgcattcatacatcttgaagtcgcgcttgaacccatatcggtcggtacgtcggctataggctttaaaggcgaccttccggttgtttgggcaccaatagacatcctcgtgttcgtcataccaccagttatacggatggtaggcttgctttgggaaggatcgtttctgttcttggcgataggtgttgtagggaatgagcgatgtgaccgtttcttgctcttccatgtaaagataattgctttcacttccgtagcctgcatcggcaatgaaccagtttggcaaaggcagacctgtcgctttaaagtgctcaaaatgcgggatcaaacaacgggtatcggttgggttttggtgaaccgtgtagtaaagaatgaattggttttgagtcgccacttgccagttataccctgccttgagttgcccattgttcatgtgatcgtctttcatccgcatgaacgtggcatctgggtcggttttagaaaagctgtttcgctcgccaaagaggcccatctgttcttcgtatttttccaaacgaggaagatggtctttcgttaagcttcggtaggcctttcgtagtggcttgctcgcttcttggtgggcctgtttttcttctttggatggggctactgcgattgcttggtccatcgcattcagttccttttccacctttgtgacgacgtcttgaagacgtttgtggctgatccgttgccgttcaaacgtggcatcttcctgcttgaaggtttcggtatccaacgcaatcgcttcttgaatgacctctaacgtttcctcgattttcatttgaagcttctcttcgtgggaaagcgtgctctttttccaaacgaacgagtatttattggcgttcgcttcgattttggtgccatcgagaaaatacgcctccaagtcgacatagccttcctcgattaggagatgcgtcatttcggtatacaggccttccatcaacgattggaaacgttctgagcgaaagcgattgatcgtccgaaagttcggggcttgtccagcagcgagccacatcatcggcaggttttctttgagggcttgtcccatggctcggcacgagaaccaacgttgcgtatacgcatataggacaatctttgtcatcattttcggatgataggcgggtctgcctccaccttcatacgcgcgaacaaagaaatcgtcatccaacccatccaccacgtcactgaccacacgcgcgacatgatgttcggggataagatcggaaaaatccataggcagatagagttgattcatggtatactcttggaaagtgacctttgggttacgcaaaaaaatcgcctgctttcgtttgaattttggtagtggtaccttcattttaaacgattgggcggtttttttgtgcttttttatctaaatgcaaaaaagccaccccaaaaggtcatttatctatgaccttttgggacaactccttgtattatagggttaatgaaataaaaattcaatatagttatagagaaaagctaatttaaatttcgtattatgtttttttaatgaacgtagaacatgtgaggaggagttacgatgaacgtagaggtggaaatattcaacatgatttcgaacgcaggtgatgcaaaatcgattgcttatgaagcgttaaaattagcgcaaaacaacgattttcatttagcgaatgagaaattggaaacagccaataaaacgttagcaaaagcacataatacccagacaaaattgattcaagcagaaatcaatggggagcatgtggaacagtctttattaatggtccatgcgcaagaccacttaatggcagctattagcgagatgtcattaattgaacagatgatcgccattctccgcagggtagctcaattagaagcgagatcggaaagtgagagtgtgtaaacatgcagcagctagggatatcgatttatccaaatcattcaacagcagaaaaggacaaacagtatatacacgtagcaaaccaatacgggtttacacgtgtatttacttgtctattatcagtagaacaagacaacattttagctagcttccaagagacgattcactatgccaaacagcttgggatggaggtcatatgcgatatcaatccacgtgtattcaaggatttgggtatttcttatgatgatctcactttttttaaaaaccttggagcggatggcatccggttagaccttggttttactggaaacgaagagtcaatgatgacgtttaatcctcatgggttgttcatagaagtcaacatgagcaattctacgaaatacattgacaatattttaagcttccaacccaaccgcaataagttaataggttgtcataatttttaccctcatcgctatagtggattgtcttatgatttctttatagaatgcagtgagaagtttaaaaaatatggattaaggacggctgcttttgtctcttcacaggcggcatcgtttggaccatggccgattgtcgaagggctgccgacactagaaatgcatcgtggtttgcctattgacgttcaagcgaaacatttgtttgccacgcggttgattgatgatgtcattataggcaatgcttacgcctctgaagaggaacttaagcgtttaagccaaataaacaaggcgaaactgacatttaatctagaactcgttgactctgtgagcgatcttgagaaaaaaattctatttgatgaaccccacttttatcgaggcgatgtttctgactatatgatccgctctacccaaagccgcgttaaatatagaggggaagctttcccaccccacaatacaacagacataaaaagaggggatgtcgtcatagaaagtgaattatatgaacaatatgccggtgaattgcaaattgctttaaaggatatgaccaattcgggccggacaaatgttattgcgaggatcagagaagaggagattttcttaattgattccttaaagccatgggacaaatttgccttttcagaatgggatgggtgagcaaatgtacgtgatcgggcttgacgcaggcggcacgaaaacacacggggctgtaatcgatcaggagcaaaacattcatttttcgatcgagacagggccaggaaacgtagctgttgatagcgaaaaagcaaaagaacatataatggctgccatacaagcttgtatacaaagtaagtacggcagtctctgtaaagcgattgttttagggatcgccggaattgaaaaagggcatttaaaaagcgaattcaaaacattggttgaacaacacttccaattgcctgcattgatgttaaacgatgccgaacttgcgctttatgccgttctcgaagacgaaaatggggtattggcaatcgcaggcaccggctccgtattgattggcaaaaaggatgcaacgatcaaaatggttggcggttgggggcatctgctcggggatgaaggaagcgcttatcacatcggaatacaagcgttaaagcaattagcctcggaaatcgagcaggggaccattcaaaccaaattagccaaggctttggctactcagtaccaattacccgacgcatcagcggtaaaggagtttgtttactcttccaccaaaaaagaaattgccgacatcgccctgtttgtgtatcgacgtgcacaagacgacacagatgcaaaaaaactattggaacaagcaggagaagaactagcccagcaagccattcggttagttaaacaacttgaattagaaacatcgtcgatcccgatcatagtaaaagggagtttattagagaaaaacgaatttgtgcgccaccattttgccgaaaaactaaaacaatgttcagctgacatttcgattgtttgtaaaaaccgaccagccgtaacaggcgctttgcatgcatggaagatttcaagtcaccattaaataggaccaacttttgtgcctgggccgtttctttagaacgattcaagagacaatgttgaacccaagggaaaggatcacctaaacgaggataacgaacagtcaaagtgcgaaccccaagcgcacataaaatccctcgatcacccgcaccaaaaatggccttatatatgtgttaaaatgtacaaagatgtaataatatggtctcatttgctgtgctatgatagaaaatagaagcgaaatcaatcattttcggttgtttattttccggaaaatgggtaaatgtcgctgtcgcactctatgtgagtgcgtggattgaaatatgtcagacatggcctgattggcaagcgtatatcgtcgcactctatgtgagtgcgtggattgaaattttgggctcctaataacgttttatacatattctcacgtcgcactctatgtgagtgcgtggattgaaatgatcatcgtttcccctcctatctataatccgcagtcgcactctatgtgagtgcgtggattgaaattgaaattgcgccctcctgcgtaaacagtggggcaagtcgcactctttgtgagtgcgtggattgaaatcccataatcgtgtctttagcatcgccatatagtggtcgcactctatgcgagtgcgtcgattgaatctttttaacagatgctaccgattccgcatctaaaggtcacacgtgtgtaagtagagtttggcccccactctttttcacgcaaaaacgtcgcactctattttgagtggaacgatgatcacttctacctcttgtttgattcctttcctaacaaacccattttcttcttgtaaaaggtcttttggataaatgcaactaccattcccgtgtggagagtgcaaaatggcgtagccattaaagcgaatgtgctttctggcgcaattgggttgtaacgaattggacaaacgctttgacgacagaaaggtcgagtgcggaattggaatagattaaccacgtttttcttaatagtgggtggttatcaatggcaaggatgcggttgtataattggtcatgcggacgaagggaaatttgagggatgattgcgtatcctaagccattgcgtaccatttctttgcaagtctcgatacggtcgacttccatcgttaccattggtggctggctaaaatgatggttccaccagtctttgatcatattatcaaagattggatcggttttataggatattcttccaatagaagggagatcacccatatgaatcttattctttgaaattaaacacacattttcttcgttaagaagtatactttgttctttccattcgtagcttccacggataatgccaatatgcacttcttttctttctagtttttgtgatatttttgtactccagccagttgtaacgtttacttgtacattgggatagaccgcaagaaaatcttttaaaatcgttggtaatcgatagtgggcgaaatgactggaaacaccgatccgtaagtggccttggatgtttccggccatgtttagcagttggtcttttgttttggctaattcatttaacattttccttgaatattcgactaaatactcgccttcgcttgtaaactgcagtcttttcgttccccgtttggcaatttcaaccccaaactcattttccaaacttcttagtctgtacgtcaaggcaggttgtgaaataaacaatttttcggccgctttcgttatgtttttcatttcatataatgtctgcaacagttcccaatctttttcgttcattgcggcctcccctaatgttttttgaaatatctttcattttactttaaaaaaacagaaacaagaagggatcatattggaccgggaagaaaatagatgaccttttgtaagtgtgtggcttatgattttcctaccatttgatttagttaggcttactttcaagaaaatatgtgtaagatttcttatcaaaaaatttttaaaaagacggattacagcgattcgataagcgtcgataacagggctttcgatcccgcgtctttattcagttatcccacattgtctgcacgctcgttttttgaaggaataaaacatacttattgaaagccatagaataaatttattttatttatcgatctctattccttataatcagatgtaattcaaagggggactggtagaaagcgattacaaaggcggaggatcgctatgtttaatgaatgcaaagacacatgcgagcgaagtgaggatggggaaaaatatcgcctatttttggaaaatttattcaagtttcttaatagggggtgttctgttggagttgaaaggtgaagaaattctcaaaaagaaggatcggtgtattcctaacaacgttgatggacaagtaaaagacaacaatggatggaatgttctttttttaaaactaagaaatacagggaggggaagcggaataggagactaataattttaaaattacattcgattcgtattaatgtgtataagggagggcttatagtgaagcgaccattcttgatgcaaatgatgccgattgttgttggagggcttttgctgtctggctgtatgacgaatgaagaaaacatgaccacggctccagacgctggaggggagggaggtgcctcatctagcaatgataccacgctaacgattgcccaaggctcggatatggtttcctttgatgtccacgatcatagcaacacgtctactgaagcgattcacgtcaatatgttcagctatctcgtcaaaaatgatgtggagggtgaagggattgttcctgatcttgcgactgattgggaattggtcgatgacgaaacgtggcaatttacgcttagagatgatgctgtgtttcataatggcgatccagtcacagccgaagatgtcaagtttacgcttgaacgtgtcgccaaagacaatacgttgcaagaacatgaaaattaccgccaaattaacgaagtagaagtgatcgatgaccacactttcctcattcacacgaatgggccgcagccagtgatgctcaatcgattgtcacgtctgggatcaggcattttgccgaaagactatattgaagaaaatggttgggatcattttctacaggagccagtcgggtccggtccttaccaatttgttgaatgggttcgtgacgatcgagtcgtattagagcggtttgatgattattttggcggtgacgtagcggtgtgggatcaactcgttttccgttcgatcccagagtcttctactagggttggggaagtcattgcgggtggtgtcgatattgccatgaatattgccccaattgactggaaccgggtcaatgagaacgaaggcacgtccattgtcgaagggcaaacaaaccgaacgatgatgttggttccgaaccaccgtgaagaatacccgacttccgacccgctcgtacgggaagcgattgatttggcaattgataatcaggcgcttctcgacaacttgatgggcggatcaggaaccccgactttgacacgagtcaacccagggaattttggcgcaaatgaggcgcttcatggcgagtaccgctacgaccctgaccgtgccaaggagctattggaagaagccggttatggggatgggctagaactgacgctgcattccccagatgggcgctacttgcaagatcgggaaacaacagaagtgattgccgggatgttaagcgaaatcgggattgatgtaaaaatcgattttatggaatggagcgcctatgtcgaccttcgtgatgcccatgaacagaaagatttatatttgattggccttactggttcattgtgggatgcggctcaccaattgcgccaccatacgtctatggtcgcagaggaccatattggctacagcaatgaagaatttgatcagatctatttagaggcagaagtgaacatggatgaagccgagcgggaacaacaatacattgatttgcagacgatggcggacgaagagttaatcaatattatgctcttccagctggatagtttttacgctgtcaatgatcggattcagtttgagcctcgtcttgatgaaatgtggagagtggaggaaatcacattaagcgaatagggattgaaggctcggaaggaggaaggatgaagaccttgccttcatccttttactatcgggggtggaacgattgaggaagtatttactgtggcgcgttttgcaaatcataccggttctctttctaatatcgatttttgtgtttgccttgttgtaccttgctggggatcctgttgcgttaatgcttcctgaggatgccacccaggaacaagtggatgcactccgggaatcgttagggttggaccagcctttttatattcaatacctctcctttgttggagacgtgatacaaggggatttcggttattcttatcgctatagccagccagctttgccgatcgtgctggaaaggttgccggcaacgttcgaattggcctttgcttcgatgattgtagctgtactgattgccgtccctctcggcattctctctgcgacaaagcgaaatacagcactagatgtattcatatccggtgcctcggtattaggaaaagcgatgccgaacttttggctgggcattatgctcattcttatgttggcgattacgtatccattctttcctgtgtctgggagcggaagcatggctcatctaatattgccggcgattacattgggaacaggctgtgctgcagagatgacgcgtgtgttgcgttcaagcatgctggaaacgttaaaccaagattatgtgcggactgccgtaagcaaaggggtaaagaacttctttgttgtttataaacatgcctttcgaaatgcgctgatcccgtttattacgattacttttttgcaagtatcgacacttgtcagtggcgccttgattacagaagtggtcttttcctggccgggactagggcagctcttaattcaagccattaatggacgggatatggcggttgtgcaagcgactgtttttatcgttgcttttattgtgattgttgtgaacctgatggccgatgtgttgtatcgggttcttgaccctaggattcaatttgattaggaggggaccccatgcagacagaacaaccggtgaagcatttgcgcaaccatacgaccgagaataggctagccaactggacgcgtaggtgggccaggctcctatttaaaagcaagaccggaaccattggcttgatcattacaggattgatcttcttgttggcgatatttgctcctgttctttctccttaccatcccaatgtccaaaactatgctgcgatgaatgtaccgccagtatggttggaagggggaatgaaggaacatcttttggggacagacaatttagggagagatatgctcagccgaatcatctacggcacacaggtctcgcttttagtcggggtttgttccgtcgtggtagcaggggcgattggcatgttttttggattaatcgctggctattacggagggttcattgacaatgtgctcatgagaatcgttgatgcgtttttagccatccctaacgtcttgttcattcttgtcatcttaggcgtcttatccccagggctgctgactcttatttttgttattggattgacgaactgggtcatttatgcccggcttgttcgaggagatgtcttatccattaaagaacgtgaatttattaaagcagcgcggacgattggaacgaaaaatccggtgatcatttgcaagcatgtattgccgaatgtaatgccgtcctttattgtgatttcgactttgagtgtagccacgacgattgtcctcgaagcatcgctcagctatctagggctaggtgttcagccgcctacggtgtcctggggcgggatgttgtcggcggggagggattatctggccacaagctggtggattgctacttttcctggattagcgattatgatcaccgttttagggattatctttttaggtgattggttgcgggatgtgttggatccccgttcccaaacgctccgttcatagtttaaacggcagccattcaagttctcatctaggaggttagcgtatggcacgacagaaccgattgttagaggtagagaatttaaaaacatacttccatacagaaaacggaacagtcccttctgtggatggtgtctcgtttcatgtggatagaggggaaacggtggcgattgtaggcgaatcaggcagcggcaaaagcgtgacgtctttttcaatcatgggtttggtgagcccaccagggaagattgaagcggggcacattcgttttgatggaacggagcttacttccctgtcggaacggaaaatgcgaaaagtgagaggcaatgaaattgcgatgatttttcaggagccgctcacttcccttaacccggtgtttacggtgggccatcaaatttcagaagcgattttgcttcaccaggacacgaaaaaagcagaagcgcgcaaacaaggcattgctatgctaaaacgtgtcggcattccaagagctgaacaagtttaccagtcttatccacacgctttaagcggagggatgaggcagcgtgtcatgattgccatggcgttgtcgtgcaatccgaaaatgttaattgccgatgaaccaacaactgcactcgatgtcacgatacaagcgcaaattttgcggctccttaaaaagattagcaaagaagtcgatacgtcgattattttgatcactcatgatcttggtgtcgtcgccgaactagtcgaccgcgtcattgttatgtatgctggccaaatagtcgaacaagccgatgtgtatacgatttttaaggatccaaaacacccgtatacgcaaggattgctggaaagtacgcctaagattcacgaactgcatgatgagctcaaatcgattcgcggggttgtgcccgtcccaacaaacatgcctacaggttgtcgttttcaccctcgttgtccccatgcgatggacatatgcaaggaaaaagaaccgatgatggttgatcgtgatgggaaagcgcaagtgcgttgttggctctatgctagtgagaaggaggatgtaggatgataaaggaagtcgcgaatacaaaggaggatgacacgcttcttgaaatcaaagggttaaaaaagcacttcgatgtcacaagaaaaatttttgcgaaaaagaaagacattttaaaagcagtggacggtgttgactttatcgtaaaaaagggagagacatttgggattgtaggcgaatcggggtgcgggaaatcgacaactgggaatatgattatgcgtcttgccgatcctacggcaggatcgatccattttgaaggaaaagacttgagcaagttggccaaaaatgaacaaagcaagatgaaaaaagacattcaaatgatttttcaggaccctttttcttccttaaatccacgcatgagagtgtttgaaatcattgccgagccattacggacacacaaaatagcaacaggaaaagaattgaaacaacaagtgtatgaactactggacgtcgtcggcttggatcgctcgttggctaaacgtttcccccatgagtttagcggcggccagcgtcagcggattggcatagcccgcgccttagcgttgcgccccaagcttattgtatgcgatgaacctgtatcggcgttggatgtttcgatccagtcacaagtgctgaatttgctttcaaaactgcagaaagattttgatcttacctatatttttattgcccacggcctcccagtcgtcaaacatattagtgaccgtgtggcagtcatgtaccttggaaaaatcgtcgaaaccgcagcaacggaggagctgttcaagcatccgaaacatccgtatacagaaggattgcttcgcgctatccctgtcccagatccgacattaagaagcttggattctggggaattgctagaaggggatttgccaagccccgttaatccaccaagcggctgtcactttcgtacgcggtgtccttatgcaaatgagaaatgcaaagcggaggctcctaaactacaagaagtagcaaaggcccactatgtagcatgccattatccgttgcaagcggggcgcggggtcatcatggaacatgcttaaagggaggagcttataagatgcgttcttactagaaaagggaggtgcaaatcgtgcaacaaacgtatgaagcattgaaaaacgatcccgccattcaacaaggattggcctttattgaagaagatgatgaacagacacttgctgagcaagtcgccatgacggaaataccagcgccaccattcaaggaagcggaacgggcggcgtacgtgcaacagaagttcagtgaatacggactagaagcagtgcggcgggataaggaaggcaatgtcatcggcgcctataaaggggtgggggatgggcctgtaatcgtcctttccgctcatttggataccgtcttccccgaaggaacagacacgaaggtaagacgggaacgagacaggttgtgtgccccgggcatttttgatgatacgagagggcttgcggaaatgctatccatcattcgcgctctgcataggacgaatgtaaaaacaagcggcaccatccaattcgtcgcctcggtaggggaggaaggaataggggatttaagaggtgtaaaagcttttttcgctgactcgccgaacgttgacgcctttatttctattgacggaacaggtgtagggcatatcgtctatgaaggaacaggcagctgtcgttataaaatcacatactcagcaaccggcgggcatagctatggggacttcgggctaccaagtgcgattcatgccgctggaagggcagttgcagcgatcgccgattgccggccgccaactgaaccaaaaacgacctttacgattggagaaattgctggcggaacggcagtcaatgcgattgcaagctctgcttcctttcaccttgatgtccgttcgacaagtccacaagcgttggaacagttggaatcgactttcttaaaagcatgcgagcaagcggctgaacaagaaaatcggcattggcaaaagcacgatgtcacagtcgatataaaacgagtcggcgaccgccccgcaggacggcaagataaagaggcaacgattgtgcaagctgttgttcaggcaagcaaggagctaggcattgctccgactttgaaaggggcagcgagtaccgattccaatattccgattcacttaggaatcccggcggtcactgtgggacgaggagggaatggaggcgggacacatacgctcggggagtggtttgaacctgtgcatgcttatctctcgccccaaagaacgttcttggcggcccttgcccttgtcggcgtcgaccaagtgtctcgtccacttctcgcctagtcgcctagcaaacaccgtcattccggtaaaaaatgtatacaaataaaggtggaaccgatgtccagtcaattggatgctgacaacatgaaaaagccaagcaaggcaacctacaaatatgtggtgctcggtgtgctgctgctattcttgtttgcctctcctttcttgcctgttcccgagtcgatggaactgagagggtggagcgctcttgccgtggtaactttagggattggactgtggtttacccatctccttcctccggcagtgactgcaatgcttctgattgtcctcttccctttgtttggcgttctaacgtttgaacaatcagcggcgagcctaggcaaagaagtgatttggctaatcatcgccatgctaatgatgggcgccgcggttgaacgtactggattggacaaacgcattgcgttcacgatcctgacgctgacaaaaggaaatatccgccttgtcctactagcattaatttttgtcggttttgtgttaacgttttttcttccgaatgcgatcggaagagtcgtcgttttgctgccgattgctttaggggttgtccagtcattggcaggaactggcgggccgaacgtaggaaaagcgagcatgtttgcgataacgtatacacctattatctgttcagtcgcgttaataactggggcaacgggctctgtctatgcagcaagtctgtttgaaacgatgctcggctttgaatggcgttacttgtactggatggcggtcatgttgccgtcaacgcttgccatactccttattctttggcttgcgcttctatggctatttcctataaaggctgggaagcacgctcaaggaaaagcttattttgaacaggaaaaagaaaagctgggcccaatgtcattccaggagaagacgctgctcattttgtacgtcttgttaatcacgctatggacaacacaaagcgtgcatcagctgtctatttctttctccgccgtgttgattgtgattgctttgtacattccgggcatccaactcatggagtggaaagaagcagtagcgaaagtggattggtccattcctctcttgttttctgctggcttttcaatggcggaagcatttgaagcaggtggcgttgttcagtggtcttcatcgttggcttctgctcatttaaatggattgccagcgttcactcttgccgtgtcattgttgctcgttgttgcggctattcgtatcggttttaccaatttaactgctatgattgcgtctttgatgcctgtggcattaacgtttgcggcaggatcgaatgtgaacccggtctggctgggaatgatttgccttgctgcttgcagcacaggctttctgttcccttcccagtctgtagggacaatgatgacgtatgctctcggttactataccagccaggaactattaaaagtaggagcgacctaacgttatcggtcattgtcataacccttctggctgcatttctttattggccgcttattggcttgccagttcattaagtgctaaaagcgaagaaattcgctgtaaaagggtggaaaccaacgcttgtttaaaggagattaatggatgttaaaaaataaaagcataacggagaagaaaagaaacattgaagaagcggtagatcgaagagacagcgagttgcggcagctggcgctgaatattcacgcccacccagagttggggtatcaagagtataaggcttccaactggctgtcgactttgctggaaaaggaagggtttgccgtgaagcgagggatagctgggctggacacagcttttacagccacttgggcagggaaggcaggggggcctgttattggcttgttagcggaatatgatgcgttgccacgtcttggccatgcctgtggccataaccttattggcacttcttctgtcggtgcagcgcttgcattaaaggatgcgtttccagaactccaggcaacgatccaggtgatcggaacgccagcggaagaaggattaggcgggaaagtcattatgtgcgaacacggggttttcaatcatcttgacgcagcgatgatgtgccacccgaaaaacaagacaatggtcataagaggcggtctagcgcgggtaggcgcaacattcaaattttatggaaaagaatcgcacgcagcttccgcgccagaaaaaggggtgagtgccctagatgccctagtgggagcctataacgccattaatagtttgcggcagtttttttccgatgatgtcagaattcatggggtgattacccatggcggcgatgcggccaatatcgttcctggctatagtgaagcttcgttcctaatccgctgcaatacgcgaaaagaactcgaacatgtaaaagaaaaagtctacacagctgtgcgccagtcggccgctgcagtgggtgccacaagcaagattgaagaacatcttatttacgcagaacgaaacacaaacaaaacattggcgaatctttttaaagaaaatttgcaattgatgggcatcgaagtcagtccgccgccacttcaagggggaatcggttcttctgatatcggcaatgtcagccagcttgtacctacgatccacccgtacatcaaaattggagaggcaaccaaccatacccacgactttacaaacgaaaccaagtcagagggtgggctgaaaggcatgaatcaagctgcaaaagcgctcgcgatgacagcctatgatttatgcgagctacctggagcgttacagcgcgtcaaagaggagtttgccaactggcaattagaaaacgtctaacttctgtatgcatggcttaaaaaataaagcggtaagaaaggtggatgtttccaatggcaacaacaatattggcggaaaaacaagagattttaacggcattggatcaacgggataaggaacttcgagagctggcgctcatgattcatgccaacccagaactgtcttttaaagaatacaaagcagcagaatggttatctgcttatttagaaaaagaaggtttccaagtagaacggggcgttgctggcttagagacggcgtttacggccgtttgggaaggcaatccaggtggcccggttatcgggatattagcggagtatgacgcattgccaaacttaggccatgcttgtggccataatctcattggcactgctgctgttggtgcagccgtcgcattaaaagatgcctaccctgaattgcaaggaacgattaaagtgataggcacaccggcggaagaaggcggcggcgggaaaatttatatgtgcgaccacggcaccttcaacgatctcgatgctgcgatgatggtccatccaaaaaacaaaacgatggtgttgcgtggaggactagcatgcatgacagcgacgttttcgttttatggaaaagaatcacacgccgcctcagcgccagaaaaagggatcagtgccctagatgcgctcattcaaagttacaatgccatcaacagtttacggcagtttttcaccgatgatgttcggatccacggaatcattaccaaaggcggcgatgcggccaatatcgtccctggacattgtgaagcccaatttatcatccgcgcagccacgaccaatcggctccatgaaataaaggaaaaagtatatgaagcggttcgccattcgagccaatcagtcggcgccaaatacaagatcgaagaaggcctcatatatgccgagcgtaacaacaaccatgccttggcagagctttttaaggagaactgggaagcaatgggcattgaagtagaagatccaccaaaacaaggaggaatcggctcctccgacatcggcaatgtcggccaggtgacagccaccattcatccctatattaaaattggcgaaaacacgaaccatacgtttgagtttacagaagatacaaagtcagaaggcggcatgaaaggcatgaatcaagccgcagcgggattagcgatgaccgcctatgatctatgtaccaatccagatgcattaaaagcaatccgcgatgaatttgaagcgtggaaaaagacacaaggacgttagtcaggaagcgcctgttttagacaggtgcttttttaggcgcagggaggattgtaggaaacactggttccatcatgaaaaggattgatgggtcctacacgtaccagggatacccgctcccttgctctccagatccagaggaacgttgtagtaaaaacccgaatccataaataaaggttcgagctttccaatgggtatttacatacggttagtaacgtctttccctattccgaagtacaaacaaagcgatcggtgcatagaaaggaataatcgataagacagtatgtatccatgctttttttgcataggcctcgtaaaggcggtatacgatgtagataagcagaatccataaagtaatcgacacgaaccgatagatgggctctgggattttaactaataaatggatgtataattgatggaagggaagaaagcgaaagacaatggtgacacagccaatgagtaagacctttatgcccccatttcctcgtagtttccctgaaatcaattcaccgacaatccaaaactgagcaatcggtatccagcttagccaagggtgacggatatgggcattcttggccattctcgataaagcagcggccactattaaatgagcaataagccaaagggtaaataaacaaatatataggaacaacatcagattcagtacaagaagaaacgattctcttatctcctcaggcgattgagcatacgccgtcataaaaaatacccccttccgagctatataatcaatgtttaggatgtctctcattaaaaaagcaagcgttaccaacatcctaacacatggacaaatcgtgtgtctcttattgtaaaaacggcggtggtgttagttagaacccttagtattacagaatagcaatacggtggaacgatccttaaaggcaaacgattctcgatttcttcaataagcattcgccgatgctcacttttctcgagtgcgaaccctaagcgcacataaaatccctagatcacccgcaccaaaaacagcctcgaatatgggttactatgtacaaaaatgtaataatgtgaccttgttgggtgtgctatgataagaattagaaggggaaccattcgttttcggttgtatatttccggaaaatgggtgaaattcgctgtcgcactctatgtgagtgcgtggattgaaatattttgaaattggaaatccaataagttcattcttgtcgcactctttgtgagtgcgtggattgaaatttcgtgaaacctcacgtcagcattcactacaaaaccgtcgcactctatgtgagtgcgtggattgaaataataaatggtctgtagatgatctgtacacatctatggcgcactcttcgtgagtgcgtcgcataaactaagacaagccccaccgcttgctacaacaagtcttttccctgctcaattcgagtgcaaaatacgtttctcttactagaccaacaagtgcatcacacctataaatacacgtattaaaacacaaaactagaaagtaaattccaattaagggaggagtaaacaatggaagagaaagaaatgctagagctcttgttacagaaggtaactgatctggaattggggttgaaagagcaaaaagagcataatgccgcggtagcaaaagatttagaagaccaaaaagagcataatgctatggctgcaaaagatataaaagaacaaaaagggcataatgctgcggtcgcaaaagatttaaaagagcaaaaagcctataatgcagcattcgccaaagacttaaaagaacaaaaaacgcaagttgctgggatcacaaaagaactaaaagagcaaaaagagcactacttggccatggcacaagatatcaaggaattaaaagaagatcagctcataattaagcaagcggtgcttgaaacaaatcgaagtgtaaagaatattaagacaaatatcgagaatttgagtgaccaagtgagtcagttgtctgaagaccaaaaatccgtccgggagattttaggcgatcatgaagtggcgattcgaacgcttagaaaaaagccggtttaaagatttggatagaaaaagtagggctcacaacgaaacaaaatagtagatgatctttttccgcatctatttcgctgcggcttttttgttttctcataaagcttcctttgagaggatatttcaacatttataggaaggtttttaaagcgtatttcccccatgcagtttggcatcaaatcgttacacccagccactgtcgatactttatccttcaaacaccccccatgcagcagtataactcagcaccatttccctcatgtccattctcctcctgataaaaatcgtttctgaatttcggatgtttttttgcgattttaggattaacgtgtggttgagtctgctttaacataagggatagcaaagggagggattgttttgaaagcgcttaaaaaattcggtgtagtggtcggtttggctgttgtggcaacgggctgcggtgggaatggaagcagcggcgatgacacattggtcgtgtatacaacgcgtagtgagagtttgaatgaagcggtgattccccaatttgagaaggaaacgggcattcgcgtgcagatgatttcggctggcacaggggaagcgattactcgggttgagtcggagcgtaataacccgcaaggcgatgtgttgtgggcggctgatatcacgatgctttatgataaaaccgatttgttcgaggagtatgtgtcgccggaagatgaatatatgatggaagggtttaaaaacacaactggttatttttcgcctgccttttctgatccgacggtgtttattgtcaatactgatttagcgggcgatatggaaattgaaagtttccaggacttgttgaatccagagttgaaaggacggattgcctttggcgaccctgtcaattcaagttcggcgttccagtcgttaattgcgatgctttacgctgcgggggacggcgatccgatgtcggatcaggcttgggagtttgtcaaagcgtttgtagccaatttggacggcaaagtgcaaggcagttccgggcaagtgcataaaggtgtggccgacggtgaatatgttgttggattgacatgggaagatcctgttgtccattacaagcaaagcggggcagcggttgaagtcgtgtttccaactgaaggggttgtctatccaggccagtcgatccaaattattaagggcacgaaaaatttagagaatgccaagaaattcgttgactacgtgttatcggaagaagtgcaaagccgcacggggcaggagttgacggttcggccgcttcgtgaaggcgtagaggtggctgactacatgacaccacaagaggaaattaagctgtttgatgaatatgacgagatgtttattatcgagaacatggatgacattaccgctcgttatgttgaagtgctcgaaggttcaatggattaagggacagcggcatgcttgcttgtccggctggcatgcctgattgtgaatggaaggaggcaataagatgggtgtagcaattgatattgacaatgtggtcaaaatgtacgatgagcatacggttattgatgggttgtcgctcacgattcagccaggtgaattgtttacgttattaggtccgtctggttgtgggaaaacgacgctcttgcgaatgattatcggttttaattctgtggacggcggtgcgattaaagtcgatggccagcgcatcaatgacgttcctgtcagcaagcggaaaatggggatggtgtttcaaaactatgcgattttcccccatatgacagtggcagagaacatcgcctttgggttgaagacgctcaaggatagcaaggcgcaaatgcaaagcaagattgatcatataatgaaggtcgtgcacattcaagaccaccatagcaaaaagccagataagctttcagggggccaacaacaacgggttgcacttgcccgggcgcttgtgattaatccgaatgttttgttaatggatgagccgctttcgaacttggatgcgaaactgcggattgagatgagaaatgcgattaaagaaattcagcaagaagtggggataacgaccgtttatgtgacccatgaccaagaagaggcgctggcgatttctgaccggattgctgttatgaataaaggggtgatccaacaaattggcaaacctgaacaaatttatttgcgtccaacgaatttgtttgttgcccagtttattggcacttccaatgtgattaaagcgaaggttgaaaagcaaggcactgatacgttcatcgtctttaatggcgaatacaaagaaaagcttgataacgttgtagaaacggttgaaaatgggcaggaagtgctggtgtctgtccgtccacaggaatttacgattacgcaagaagcaagtgccatcgctggcgttgtcgaaagcacgatgtttttagggatcaatacgcattatctcgtcacccttacgactggagagcgagtggaagtggtgcaacatatcgaagacaaagcgatcattccagagggaacgaatatttatgtaaaggtgaagccgcatttaattaacttgtttgatgtggcgaatgaacaaacgctcatgaaggcaggtgagtgacatgcggcctaaagcgttcaatggctggaattggatcacgctgtcaattgtgctattctttgctttattcattttgtttccggttgtgttagtcttgaataagagcatttataatggggaagcggggcgtttcacgcttgagcatttctcgctcttttttgaacggaagttttattgggtgacgctgtggaatagcatcaaagtgactgtagtagcaacggtcttggctgttttgatcggcctgcctcttgcttacatgttgcggcgagtgaaaattttcggaagtggcattgtccaaattctcattattgtctcgtatatctcgccgccgtttattggcgcctatgcgtggattcagctactcggtcggagcggcgttattacgaaatggatcaatgatacctttcaacttcagtttgatggcatttatggctttgccggaattgtacttgtactaacattacaatcattcccgcttattttcatttatatttctggggcattgaagaaccttgacaattcattgatcgaggcggcggaaagccttggctattccggcgtgcagcgcgtcgttaaaattgtcgttccgctgattgcgccgacgattctggccagctcgctccttgtctttatgcgcgtaattgctgattttggcacaccgatgttgattggcgaagggtacaggacgattcctgttttgatttatacgcagtttatgagtgaagtcggcggcgatgcaggctttgcggcagcacttgcgtcgatctttattatcgtgacgattgctttgtttctcgtacagcgagtgattgcacggcaatactcgtattcaatgtcggccctgcggccaatggaaacaaagaaaagcacaggcttgaaaaacttgcttagccatgtggctgtttacggggtcacactgttggcgattttgccgcagctcgttgtcgtctacacttcttttttggaaacgatcggcggccaagtgtatacaggaaagttctcattgcaaaattatgagaacatcttgtttaaccgcgatttgtcgatgattttaaatacgtaccagttaggcctgatcgcgatcgtggtgattgtcattctcgggatattgattgcgtatttaacggtgcgcaaacgaaataaagtaacatcgttgcttgatacggtgtccatgcttccttttgtaatccctggttctgtgttagcaatggcgctcatattcgcttttggcgaagcacccctgtatttaacgggaacgagcttaattatggtgctagcttttgtgattcggcgtatgccttatacggttcgttccagtacggcgattgttagccaaattagcccgagcatggaagaagcggccatcagtcttggtgcttctgaacggcggacattttttcgggtagtcgtgccgatgatgatgcctggcgtgttggcaggtgctattatgagttggatgacgatccttggtgaattgagcgcgtcaattattttgtattcaaccaatacacaaacgctcgctgtttccatttatacagaagtaatccgtggaaacttcggcaatgcctctgcttattcggccattttaacggtaacatcgattttgtcgctgtttctcttttttaagttgacaggcaaaaaagaaatgaacgtgtaatctgcagaagaacgctcaggctgggagaaaacgcttgccagacgaggagagcagccgtgggaaggtgcgaatagaacgggggttcatgagcgaatgagtgaggcaaacgacgacgtatgcgagcgtttgtctacagtctaagggctgcttgtaaaaggcagcccctcgttgtcctatcatcatagtggggttgaccgcgatggaacgcagacggatgaaagatgatattcaacggtcgtttttaacgaacgccatcgtcattatttccgcgattttgtgtgtatatctattgtctttgctttttttattcaatgtatcgattgtgcgaccgagccaagcgacaaatgaacgagtggctaaagaggtcgaagcggagtttgcccactataaagagggaatggcccgtttagtagccgatgaacaaattagagcgtttttacgtggcgaaggaaaaagcggcgaagtgaatcaattgctttacgacttccgtaatgcgcaaacgtttcagtcagactttgtcttgttggatagcgaagaggaaattgtcgcgacaagcttgtatgaagggcagaaagaacaattgcagcaaagcccggtcttgcgggaacaaatgcaacaagcagaggaacatccatttacaggggagtatgtcaataaacgagcgttcaatgccggccaaggaggcgcttacgtgtttgccgctgcggttgaagagggggaagagcgtgcaggttatttgctgttcttgcttgaacataccctgccgtcggctagtgagcaaattgtatttgtcaccgattcattctataatgccgttttttatagccacacattcggaattggcgcccttggaaaattaacgattccaaccgatggattccttgtccagtatgacggcaaccctttttacgtaacaaaaacagaagtcgctggccagccgattcaagtgatcacgctcacgtcggttaaaacgtatcaactgctgttgttgtatggccttttggcgatggtcgtttcaagctttgtcatgttggctgttgtatggctagtgacaccaaaaattttaaaaaagacacttgaaccttttgatgcgctagtggcgcgaatttcttcaaagaataaccatcttcattttcaacaaacagaccatgtctttgcggaagtgcagacgatttacgaagaatatacgaataaagtccatgaaattcaagcacttgttgataaaaacgaagaaattcttgagaaaaaacgcttaagtgaaatcaaacatttagaggcaaaatttaatccccatttcctttataatgtattagaaatgatcaaatatgaaacattggctaacccagagagcgcagcggagatgattgtcaaaacagcgaaattgatgcgctataatgctcattttggcgacacgaccgttttgttggaagaagatatcgcctacttgcgagactattttgccttgcaaaaaatgcgctatggcaagaggctcgattacacgattgcgattgagccagaactaggccgtgcccgcgtgccgaaactactgctccaaccattgattgaaaatgccgttaagcacaatattgacggcatccgctgtttaaacgttgatgtaagcgcctactgggaaaacggggtgctcacatttgtggtagaggacaatgggctcggcatgacgcctggaaaaatggcgaaaatcaaagcgattatggcaggagaaagaaaagaggcggcgcataccggtttgaaaaatacacaccaaatgattcaattgctttacgggcaacgatacgggattgacattgcttcagcgccggaaaaaggagaggggacaaccgtccgtatgcacattccatatgaggggtgacaacatgctaaaagtggcgatcgtggaagatgaaccgatcctgttaaaaggactgctctaccgcgtggactggctcagtaacgactgtacagtcgtcggtgccgctgaggatggggcggaagggctgaacctcattaaacaaacaaaaccggacattatcattacagacattcgcatgccgtttaaagacgggctggccatgttaaaagaagcaaaagccgaccattcctttgaagcgattattttatctggttttggcgagttcgattatgccaagcaggcgatcacgattggcgtccatgattatttgctaaaaccagttgatatgcatgaattggaggcgaccttgcaaaagctcgtgcaaaaactgcaggcacaaaaaagcaacgatcatttaacaaaacaaacaaaagtgtatagccatcttctcgacttggggagaggcagccattcaacctatgtcgccgaaattatggactttataaaaaaacattaccatgaaaaagtaacgttaaaagcagcaagcaatgaaattggcctttccacagtcagcttgaatgacaagttaaaggaaaaaacaggatacagctttaatgaattagttacacgctaccgccttactaaggcaattagcttgcttcaagacgaaaagctgcttatctatgaagtcgctgaaaaaaccggctttagcgactataagtattttagccaagtgtttaaaaaatacacgggcatgtcgcctaagcagttttgcggcaaatagaaaagcaagagagaaggcggcccctcttgcgggagccgctttaattggttgttctcctgcttagcggaatggttaattttgcttggccattggcagcctggctagaagagcaatggttattggcctgcgcctaatttaaacaagttttgcttagcgtggtaggcaatttttaagtattttaacgccaatgttgtatgtccggcttgttcaaaataagtcgctgcttcttctgcaagctcgtccacttcaaagtcaaagccttccttatctaactgctcaattgctttgtcaatcagtgcatagttgccttctgcatataatcctctagtcgctaaacatcgcgctttgtattctttatttcggtaaaactctgccccgattgccgccttcttcaaataaggcgctgcgtgttggggcaaattcaagcgatacaatgtattggctaaattgtacgtgtttttgacaccgataagggtatgctggaattcatggtaagacaatgttttttcaaaccattgccgagcttgttcgtaatgatggtacctaagggcgttcaggcctaaagcgcgaaggaccgccattttggaaaaagggtatggatgagcggcggcgagcgcttcattaagaatcagaacggctttatcgtattgcttggtttccgaataaatgcccccaaggatcgtttggcaatggatggaacgttccttgttccctaaacggttaaattcgacgagtgcttcttcaatataagaaccagcaaatgggtactggctgatccgataaagggagaggcccatatagtaatgaaattctgcttcttcttctttgttttccacatattcgagcaagcgttcagctttgcggaataaggtaatggcggagcggtagcgttcattgacaaattcattttggccgcatgaaaaataatataaatatttcaatagatggtcgactgattcctcagctaccatcccggccctcttcaacatttcgtcgtcagcgccaccttggctagcttgtttgcacataagacggtagcgaaagttgacgagtgcataataggcgagcaaacgttcatttttttcaatctgcttaaacatcgcatccacttttgcctttaattgtgaagcttgttccacggaacgggcaatgatgcaactgtaccactcggcaattgtggctcctgctttctcaggggaaacagcaacggtcatcttttatcacctttcattgaaaatttgttcaattacgttcagtcgttttacataaaaaaaacgagtgacagcaacagtcgtaataaaaaatgaagccacttaccaaaacagaatagcgtgttgatcgtttgttccaatgaagcttgttcgtttattatcagcgattaattgggaaatcgtcaaggctttttggctttttttactgaatgatttgaataattatgcggaggaagagtacaaaccctttttaacaatgtcaaggaagaggcggcgcttctaggaccacggtgttaggacgaaagtgcgtggcaaggtatgttttccagacggacaagcaacactaacagcaggcaatagaaagagaggatgcttgcgatggctaaaccagtaataggaattacgagcacaattgcccttcataatcaaattccaagtgtagacctcgccgaaaaggtcgtcaaagccgtcatgaacgctggaggtgtgcccattgtgctccctgtagggaacgtcgagcttgcttctgattggataaaagcatgcgatggcttaatcttaagcagcggcgaggatgtagatccatatttatataaggctgaaccttcaccgaaactgcaaaaaacatttaaacaacgtgatgaagtagaaatggaactagtcaaacaagctttgcagcagaaaaagccgatttttgcgatttgcagaggcattggcgtcttgaacgttgctttaggaggaagcttgatgcaggacattgaaacaggccttccaaatgcttgcaaacactaccaggaagcaggccgcacagatgtgactcaccgtattcagattgtgaaagatagcctgttgcatcaggtgatcggctccgaagagataagggtgaacagtttgcatcaccaggcaatcagcaggcttgctccaccattaaagaaggtcgcctcggccgctgatggcgtcattgaggcagtagaaggcaaagcaggaatgccctatgtccttggcgtccaatggcatccagaagaattagcagcaaacgatgcagcgatggcacggttattcactgtgttgattgagagagcgagtgagaagtccatataggcgttttgttgctgtatgattggcgagtcgtccacagcttcatatgcttcaaagcccctcggaaacgacgactggaggcccttccctttaggaaagagcctcttgtttatgatgagcctagacggtccaacacttgttgttttgacggcatccctgcctgtgcgcctgcctgttctactgatagcgaagcagcggcattagcgaacgtcaccgcttcggttaattgctggccagaagccaaagctgcagcaagagcgccattgaatgtatcgcctgctccggtggtatcgacgacgtttgctgggaatccgttcacttgaacgagctgttggccgtcgtggtaggcggcgcctttttttccttctgttacaagcaacttgtttggatatctctggaccgcttgttcaaccgattgcttaaaaatcgtctggcactctgtttcatttggagtgatataatcaacgagatcaagcaacgatgacggcaacggctgtgcgggggcaggatttagaatgacgatgcatcgttcttccttgcctattttagcgattttctcgataaaagggagcggcacttcaagttgaagcacgaggacgtttgtctgtttgaacacatcacggtattgggcggcatcctcgggcttccaactgaaattggctccaggtgcgacaacaatcgcattgtcgttgtttgtgaccgtaatcatggctacgcctgtatgtccgtccttctcaacctctatgtaatccgtgttaatttgttcgttttgtaagttgtctgtgacaagctttccgtacgggtcattgccgactttgcctatcatcgtcacgtcagcaccaagccttgccgcagcaactgcttgattggccccttttcctcctggattcatttgaaactcgccgccaagcactgtttcccctaagacaggcatggtgcccgtatggacgacaagatcaatgtttatactgccaacaaccgtaatcaatggatacgcctcctcttccgaataactccattttactataaattgttttgccagagaaatttcagcaggggcctgtgaacgtgtggcgcgagccagccgaaaggctcgatcatgaaaaggacgcctcaaaacatattgtcttgagggcgtccttttttcgggaagtgaatatcaaacgatgtccctttagatggttcgctttctacagagattgtcccacgatgagcacgaacaaggttatagacaatagccataccaagcccagttccctcagaggctgaatctgtcgtggccccccgatagtattgttgaaaaagattttccatcatatgagtcggcatgcctatgccgttatctgttatatggattcttgcctgttcgttgtaatcgaaaagctctatatagatgtcaacgggttcgggattatggatgatcgaattcattaaaatgttttgcaaaatgcgttgcataaatttgtcgtcaaagtcgacgtcgattcttggcttgttcgttttaaaatggagtcgatagtcaacagcttgtgggctattgctaatatcggccacgacccttttcgtaaattcaaccaaatcctggctcgtcgtgtggatagggaacgggtgaacgccatcattcaattttaagacaagattcaaatcttgaattaactcttccatatgtttgcccttatcataaatctcctgagtaaaagagcgggcttcctctgttgaccattcatactgatttgttaataaaagggaagaatatcctgtgatatatgttaaaggcgttttcaaatcatgggaaatacctgctatccattcctgttttgcttgttcgatttttttcctttctacttcatttgcttgtaattgctcagccaataattgaagggaatggagcacttccttataaagaagataacgcatccgcaatgtttcttttcgcgtgtaaatcttccgtaggcctggaggctgcttgtaattcccttgcgagagctgatggatccatctcatgataaaagcaatcggcccgccaaaataccagccaaagaggccaatacaaacaagagtgcttagtgcaaaaatcgatccaactagtagtccttccgtattttcaccaaccaccacatcgaataagggaagaaggacttcaaagagaatcactagactaagcccagtccctagcagccaaagggtaagccccaaagcgaaatgaagggtgaagcgcgtttttattcccatggcaagccctcatttgaagggataaatttatagccaattccccgaaggttgacaatgatttttggtttgcgcgtatcatcgccaagtttctttcgcagcttggatatatggatagtcactgttttttcttctccaaacacatcatttccccaaacgcgttcataaagctgggctgtagtgaaaatacgattaggattttcacaaaaaaaatgcagcaactccagctcttttgccgtgcattctactgtttgattttgaaccattaatatcgctgattccggataaaacgcgaagtagccgtaatcgtataccggcttcttctctgaacgttcatacattttttggcgccgaagaatggccttgatgcgggcaatgacttctaaagggttgaaaggctttgtaatataatcatctccgccgatccctaatcccgttaatttatcaaagtctgtagcccgggaactaacaaaaataatgggcgtatccgtatttcgtcgtatttctgtacataattcaaatccgctaatatctggaagcatgatatcaagcaaaatgaggttgaatgttttttctttcgttaattgcagcgcctctttccccgttgttgctttgtctatatgaataaaattttctttttcaagtgtaatctccagtagctttacaatgcctatttcatcatcgactattaaaatttttgcgtgctccacttttataatccctcatttcaatcccaatcctgaaaaaattacaggcattttccttcctgtttacttcgattttactttcatggattaagctaagtgtgtaacaaatcaatacgcttattgtaccccattaagggaatcaggaggaaataagaatggaagccattatccaaatccaccaattgtataagaagtttaagggaatcgaaacaatctctaatgtcaatatgaagataaacaaaggcgaaatttatggttttttaggtccgaatggggcagggaaaacgacaattatgaaaatgattttgaatttagtcaagccttgttctggtgaaattctggtctccaatcaatcggtcaaaccaacatcctatttgtatttaaagaatatcggcagcattatcgaaaaccctgtattttatgagcggcttaccgtgaaagaaaatctcgagcttcattgtcattaccatgacgaacatgatcaacatgcagtcaaagaagcattagaagtggtcggccttgtcggtgtcgagcaaaaaagaatcgatgaactttctttaggaatgaagcagcgattagcgattgctcgggcaatcgtgacaaaaccagaaattctcattcttgatgaaccgattaatgggcttgatccaatcggaattaaagacattcgagaactgctagtgttgttaaaacaaaaatatggcgttacgatcttgatttcaagtcatattgtttcagaagtggaagcgatcgccgatacggtcgggatcatcaatcgaggaaaactgttaaaagaagtgaaaatggaagaaatccgaaaaggaaatgaccactatcttgaaatcgaagtcaacgacttggaaaaaacattgaccattctaaaaaagaagctgggcatcaaaaagtatcaaattgtaaatcaacggtcgattcgaatttttgatcaaagtctttctcaagctcaaatgaataaacagttggtggaaaacgatgtggaaatgagcaaaatggaaatgaaacaacatcatttagaagcgtattttttaaatcttattaacgaaggagggcaccatgcttaaactgatcaaattagaatggagaaaaaatcacttatcccgttattttaaaggagtcgtcatttcaatcacaacgatctttgcggcggttgcccttatgggatggggatcaaaaggacaagaagacattatgtttccggattattttgaattcatgtcgttaacaaatatattggttagaattgtatttatcattttttcagccactgttttatctcgtttagttatcgaggagtacaaaagaaacacggttcaattgttgtttacctatccactacaaagaaagaaagtaatgcgaagcaaattgttcattgtctttgggctttgttttttcagcatgattctagcctccattatgatcaatatacttgcgttttatttaaatccaatcattggattctttgaaaaaccgatgcacttaagcgatattcttggaacaatcccctctgtttttcttcaagcatttatgattgccggaatcagcctaattccgttgtattttggcatgaggaaaaaatcaacggctgccaccattacttcagctgtactaattggttttttaatcaacggatcagtttcagatggagtcgatcaaacaagcctgtttcaattcattggagtgccgatcctattctgtgtaggaggcctgatgattggctatttttcttttcatcgcctagacaaaatcgatcttatttaaacgtcaagaaaggaggaagaaaaatgaaacgaatcatggccattctcgttgcatgcgccgcaattggcggactcgtttacgggtttactaagataggggagaatcaattccaagcagaagaatcctttaacccggcgaaaattgaagaaatcgaaatcaataatgaatcatgggatgtggaactcaaacaagctgaatcaacacaactaacgattacagccgagggcacacagaaaaataaacaaagggaccctgtaaccatagaaaagcaaggaaacaaaatgacgattcaacagtcagatgaaacaggcggctcacgagggttcagctttggaaagaacggtacgatttctgtctcaattccagacaatgaaatcaacacaatcacagtgtcaaacaataatggcgatatcgaaatgaaaaatatagcgacgacaaaccttattgttacaaacggctcaggaagtgaaagaatagccgggatagctgttgaaaagggacaaattacttcaatcgatggtgaattaaccgtagacaatagttcattgcaggaattggtcgtagcttctaaggctggagatagcgatttaaccaatgtaacaagttctaagatgaacattacttcaacagacggtgaagtatctgtcaaagaagcaacagaaggagaatccctttttgtcgaaacgaagtctggcgacatcaccctgtcatacaaagaagctcctgcttcattacagcttaccgcccaaagcgaatcagccgatattacagttggattggctaatatgaaagaaacaaagagtacagagaaattaaaagagggaacaattggggaggcatcacacacagtggagctattcagtacacacggcaccatcaatataaaatagatggatgctgatcgaagcgcgtccaaatataacaaaagcgaagcctccttatcaaaggggcttcgctaaaagtcggtaatcgatcttatatggtgactcaaaaaagcttaaacagacgtacattcttttttgcacgtggagtttgtccagtgctccatgatggccgcttccttatagtcattgtcaatgacatggatggcttcaggtttgtgctgaataagacgcaatactgccgcagccatctcctgctcatcgctaggcgtggcaaaggcaagtgactctaacgcgcttataaattgttggtttaacatatcataaccgactgcatccattggaaccatcctttcaaaaagtgttgctattagtttgtacctttttaagcgggagcgcaaacattatgcttgggggagtgatgtgtaagtagggtacggcctaagcaggacaagtactaagtctagccggttcgtttttgtcttttagaaatgcacattattcaaaggcgatttcaacgtttcccatcgaaaaattgagtttgacatttactatccatttggctaatctgaattggagattaaccatttttttcaatttagggggtttgaaatgagtccttttattgtatttgtttttgtattggctttagttcttgtaggccatgcagcaatggccaatgccagaacacaaaaattaaacgaacaagcaattaaaaatgcccaagagtttcataataagtctattagtctacttgaacaaattctcgaaacagagaaacaggtattagaggaattaaggaataagcaacataattaatccgtttgccaatattgacgaagcaaacgcgcttttggcttaatggaggggttgtttggaatcaccatcaaaattagccaggtccgcagtttcgcaatttgtcaaaaccgtaggcgtaccaatatttcaagagggagtatctcaatgaaaaaaacactaatgctaggattaacaatgacgtttattgcgacagggtgttcagctccatcaaatgacatggaaataaaggaagaaatcagtcaagaaaatgaagacgtagaggctagcagtgcaggtaatgataagaatattcacagggcggttttagacggtattcataatacagcgatgatttatcatgcgacgctacaggaaacatttgatttcactgatgaagatttagtagaatttgaaaacgtgctagatcatcatgaaagtacaattcggttggcaaaagaatttgacgtttcaagtgagatacaacactcccttgaagaaagcttagaattgacaaggcaagcaatagagcaaaaagatattagcttattggaagaagcaaatgaatatttacaaaagcttgatgaacaacattggtacgaaaaaaaatagcaaccactcctaattccatgaatgataaagtattagaataggggtggttgctatttaaaaacaattagaaacaaaaccgaaaaactctttactcggctcgaatcgaaaaagggagccgactggcgaaaagctagaaatagtacccttcatttaggtgagatgggaagactctgtcggtaaaaatgtaatatctactttttcaccgtttgggctaactcctaaagtaagggcaattactagaagcgatagaaaaacaatccgtttaaacaaattgattaactcctaaagtgttttggtacagacgtgcttcatgtgcaactttcatatacttcaacgccagcttggtttttccttccttttctgcaaattgagctgcttcttctgccagttcacctacttcaaaatccattccttccttttctagatctgtaatggcctgatcgatcaaatcaaagttgtttttaatataaaggccttccataaataagcatcgggcaccatattctttgttttgatagtaagcggcacctgttgttgccattttatttttaaaaatgaaagtaggttctggggaaatacccgcatctttccctgtttaaaaagcagcctacacggccgcttttctacgatgcacgaggagatgatttccggtatacgagtttacggaacaggtggtcaattgggccgcttttttgtttggattcgagccatgcggcgcagccaagggctgtgagccaaatgcagagagtgagtccccagcctgcggccatgcctagttggtttcctagattaagtgtttgttttgagaacagcacaattaacatgatttcgttgtagataaaaaacgtaagcgatcgttttccgagggacgtgatcgcccatacaataccgcttggttttgttattttcggtcctattaagccaaagatagcggcgtaagcaacaccccctaaaatgcctgttgccatatgcaaggaaaacgtcaagccgactaaggctggcgtcaactcgatcagttggttgctgtataaggcgtggggaagagcgccgatcaaggatatggagagcccgtaaacagctgcttttttcaggaatggtttgttctttgggctttcatttaacaagcctttttgtccggagtagatacctataaggattgataccccaacaggcagcagaaaatgagcgatgaatggtccgcctgttgcaaattggataaactggcttgtgactcgctcgaagtaatgtgcgtaattgcctggaaggatcgcgtttccattaaattgtgcataggccatcgctatccatgtgagcggcaaaatgacggcatacgcaagggatacggccatgatgcttcgaagtacggttttgtcgcttcggaacagtagccaacaacacgcgagaagggccgtcccatagatggcgaggatgtcttttccgccgatcagaacggagaggatgaagccaaataaaatcagaaaccatgccctgcggtaaagagatgtttttgcctcttttatcggtttgtttcgttttaaataactgcgcacaatcaaagttagaccgtagccgaacaacaacgcaaacatcgctcttgcccggttatcaaccaaaaagacagaaagataattgacgatggtatcgtacatactcatactttcgggacgggttaacaaggagctgcccaaaaacaaagatgcatgggcgagggcgacaagaagaagcataaaacctctagcgagatcaagtgaaacaaagcgtttttgtcctagctgagcgataggattcatttgtgcgttctctcctttttgcgtgatgtttccctccattttatggaagttttaatttatgatagcactggtagaatcgcgagtcaaaacttactagtatcttttattaaaagggtaaaatacacataggtacttattagtactatagttggaaggggaagtactttcttatgaaagtaaaaaaatcttcgatgaacctttataatcaatgaaaggacataatccgtctaagaggggaacgttaaatggtgaaacaagcagatattatgcgtgcggcctttcagctattcagtgaaaagggctactcagccacaagcgtgcaagagattgtcactatatgtaaaatgtccaagggtacgttttacaaacatttttcatcaaagaaagaactcttttttaaactgttagagcaccggcattttttgactgatagcgaggagcaagcaattgaggaaagtgggcttgaagcaaaagagaaatttttgcggaaaacggaactatatatgaggagtttgtatggcaatcgaaatatctatcatctgattccttttgtaatggagcaagaagagttccgggaattagacgaaccgattagagagtttaaaattcaatcctaccatcgaataaggcagaatatagagcgcgcatactcagaagagctcggccatatttgggatttggtgttgttctatgagtcggctgtaaaagagtatgtggaagtaggctctcactatgaagaggaacttgacttttcacatggggcgcaaatggtagttttttatctcgatctcctggtgaagcatggggaagtgaaacagccccttctttcgcaccgcttgatggaaccattttgtaagtatcaaccaatccagacacgccagatgtcggcaaaggaggaagtggcacgtttcgtaactcttttagagcagcaaattgaggatgtgcctctatcaggaaccgagcgtgatgcacttcgagctaatataaagttgttaaaagaagaactcaatcaaccggagccacgtcttatgctcattcagacagtgctatcattattccaacagaacgatgcttttaaggcaaccgttgaggcaattgcaacgtatttgcgtgagggctttaaatgaatgattgggcatagctatggtgatagaaggagtttcccggcggggcggctcctttttctattggctgagacggcaccgtcagtgaaatattgtggcgatgtcatttctccatcattccgaaaaaaacaaaagtatctccaaaggaacttacagagttgaaagtgcctcattttttccagtgtggaacttgtttatacttacggtaaaggaggcagaaaaatggaagcgcaaattgcacgcacgattcgcgagcattggtatgtccagtataggcaaaatgggtatccccatgtgcaacaaggatgggtgttgccgccagggcgagagcaagattttgatccttttgtcgtgatggctgatgactggtttaaacgagggacgttttccgaccatcctcatcgtggttttcaaacgatcacgtatgtgattgacggcaggttggaacattccgataaccatggcggttattcgattttggacgcaggcgatgtccaatacatgaatgcaggttacgctgcccgccatgcggaggaggcatttgccgatgatgtcattcatacgttgcagttgtgggtgaatttgccgaaagcattaaagcgctcgcctgccagttaccaggacgtccgtctggaagaagcgccagtagtcgaaatagacggcggttcactgcgtgtttattccgggaaagcggccggtgtgactgggccgctccgttctgcagtccctgtgcagatggtggagctatcgttgcaggcgggggcggagtacgatttaacactgcctgcacaggacaatggccatctttatgtgctgcaaggggagttggcttttgggccagaggcaaacgaagtcgttttaggaaaaacgggtgtcggcttgttcaattggccaaatgaaacgggacaaaccgaaagcgtcctacgtgtccgtgccttgcagcgatcaaaagtgcttgtctattcaggaaagccactgcgcgaacaggtcgttgcccatggtccgtttgtcatgaatacgatcgaggaaattgaagaagcctatgctgattttcgcgctggcaaatttggcccgccctcgcaataatgtctatttctgttgttgcgccgccagataagcatggtgtgctttgccccatgcatgcagttgccgcaaaatcggctggagtgtttggccatgctctgatagcgaatactcgactttcgggcgaccttcgccaaaaacgcggcgctcgattaagtgttcttgttcaagctcgcgtaaatgggcggttagcactctttgggtgatgtcgggaatggcgcggcgcaactcattaaagcgcaatgttgtgtgatagtcaatgtgaagaaggatcaacactttccatttgccgataatcggcgctagcgctgtgttcactaagcattcatcggggtggtagttttccataaaagcagccctccaatcaagtcgcttcctttatttattttacgaaaaacgaaacggtacgcgccaatgatttgttttggcgagcgataaacaaagggggaatttcattgacagacaaagtgctttttaaaggcggcacgattctcacacttgaccacaagttgggtgttctgaatggggcagacttgcttgtggaaggatcgaaaattgctgctgtggagcaaacgatcgagggggttgacgccgaaatcgttgatgccgctgggatgattgtcatgccagggcttgttgatacgcaccgccatacgtggcagtcgattatccgtggcattggcagtgattggtcgttgcagacgtatttacagtccatctattttggcaaccttggcagcaaacggcggccggaagatgattacatcgcccaatggctaggtgctgttgaggccctcgatggaggagtaacaacgcttttagattggacaatgattaactcggatgaacataccgaacagcttatagctgggttgcgtgcttcaggcatccgagcccgctttgcctatggttcacctggggaagagagctattggaaccgagagagccggctcgacttagcggcgaaagcagaagaagtgaaaaacgcttattttgcctcagacggagagcttgtgaccatggcgctggcgattcgtgggccggaattttcctcttgggaagcgactattgctgaaatcgaagcagcgcgccgccttggcctcgtttgcagcatgcatctcggctttggcaactggggtgcacaagaccgatctgtcaccaagttgcacaaggctggccttcttgggcctgatctgaacattgtccatgggaatgcgattgcgaacgaggagttggaactgctccgcgatttcggcggcagcttgtcgattacgcctgaaattgaaatgatgatggggcatggctatccggtgacgggggctgcgattgaacgtggcgtaaccgctgcactaggagtggacgtggtcacatcgactggcggtgatctatttgcgcaaatgaagtttgccttgcaagcagagcgtgcaaaagaaaaccaacgtctattggatgaagggatcatgcctgaacaagtgccgttgtcgacgaaacagatgctagaagctgccacaatcgagggggcaaaagcgttaatgcttgaagataagattggcacactcacgccagggaaagaagctgatttgattatgcttcggggtgatgatgtgaatttgctgccggtaacggacccatttggtgctgtagcacaagcggcacatccaggaaatgtcgatagcgtctttgtcgcaggcaaagcaaaaaagcgcaacggccagttggttggaatcgataaagacaggttgaaaaagcaagcggtcgaggcgcgggattttatgttgtcgtctcgttaaagagagttgctggtagagccaacatcatgtagacaaccgtttgtcaggcgcgggacggggttcctgttttcatgctaaagcatagaggaccgagataaacgacgacataagcaagcggctaagtcggaagggcttgtcccatgactcggcacgagaaccaacgttgcgtatacgcatatagcacaatctttgtcatcattttcggatgataggcgggtctgcctccaccttcatacgcgcgaacaaagaaatcgtcatccaacccatccaccacgtcactgaccacacgcgcgacatgatgttcggggataagatcggaaaaatccataggcagatagagttgattcatggtatactcttggaaagtgacctttgggttacgcaaaaaaaatcgcctgctttcgtttgaattttggtagtggtaccttcattttaaacgattgggcggtttttttgtgcttttttatctaaatgcaaaaaagccaacccaaaaggtcatttatctatgaccttttgggacagctccggattttttagtaaatctctgttgcgtcttcgggcaaagcgtgaatgtgccgcaagtacgtttgtacgttttcagcatctgtgtgtcggtagtcaagcgagaagcaggaggccacctcttgcgctagctcttcaaaaaggtgtgccatcgcccatagcgcgcgccacatatcttcgtaagtggggctagggaaagtcgatagaaacagctgccaccgttcttcgtccacatactgttcgagatatttgccatgtttgccaacgctgacgcgaaactcgttgtcgatgccaactgtccattccagcatgcgcaaaagcatggcccggatgacattcaagtgatcgtatgcatacgtaaactcttggcgccacaatccttttgcgacataggtggacacccaccaaaattcattgcagcaatctgaataaagggtttggttcggcttttggacccaataatcacaatcagtcggtgcaggcaatggcggcaacgcttcatctttgtccaataacacgacagacaagcggtcgccttggttccaagtcgcgcgcctttcgattggacaaagtgttaaatcaatccggtttccatctgtaaataacatcaagtatgcaaatgtcccgtcgctttctggcggaatgagcgtcatcttttctggcgtctgcatgatgattcgttcgccaaaacaatcaatccagccaggatcggagacaaaagagtcgacgtcacggacaatgtaaacaatgtcgtaatcttgaaacgggtcttttcgggcatttcggttggttcgagatccattcatacatacggccctgatccgttcgtctgatttggccacacctagcaacaagttaatcatttcgttatatgttcgcatcgttttctcctccatctgctttcaatttaagggctgatttgctgggagagaggaggcgcgcgaatcgggtattgacgttaaggaaactgttcagcgttcatcctttttcctcctgaaatttgcgtatttcgtccatcatacatgatttttgcgatcgtgaaaaggctctctctttaaggagttacaacaaaaaagccaaaggaccttgctgatccacttggctcacattcatcataggttttcttttaaccgttttactattttcatataatcatcaggatcaattcctggcgcaaacatttccggtttttcttcaaagtctggcacaggcgccccttcaggcatgccatcaatgacatggagcggctcgcccgtttctgggttttctcctttccaaatttgacgaatgtcccggtactcaggttcatcccatgtataaagcacattgtagaggccttggtccatgtatttccgggcagtatcaaaggcattgttatcaggatgggggactggaagcatttttccgatatcgatgcctgttgcaactttaatcgctttggcataggcgataatatgcgtgcctccccgcacaagcaaataaccgcatagttctcgtgcagttgggttagtcgtcatttcgtacacacgcgctttatgtgtccgggcgccgatttcgagcacgtagttatggagcaggtcttcgattaatacaccagtattggtgacaaaatcgccattccatggacggcccatgccatcccctggataggacgtttgcgcagttgtcgtgaaatggagagaatagcgtttatctttgccgttttgtagtggcgctgtgtctgggtcccctgggaacgtgtttccataggacattaaattaatcgcattggcgaccaactcgacatggccaaactcctcagccgtaatgctcgcaattaaatcgtaaaacggtttgtatttctttttccctcgaaaattgaacgattggaacatgtagttgtttaacgtcgacatttcgccaaacttgccgcccatcaactcttgcacggctgccgcaccgtttgcatcgccatgctctgggcgcggcaactcaattgcaattctgttcactcgtttcatcataagcatttcctccctattcagtagcccatacgctcatgcatatgcgccagggaggctgtcttagtcaatttttctgtttcacttgctgagccttcgcttggtgtactttagctggatgcacccaaatgatttgctggctgcggacataaaagggagtcccgcccatttccacaacaagatggtcaggttggaccgctttaagtatgcctctcaacgcccctcgtgtcgtctgcacaccgatcgtcgtacctatttgtttcgccaacatgccgtacacataaggatcatgcaattgccattcagctttgttgctcatttgatctctcctttgcctcttggtgtaggcagtatatgcacgacaaagcaaatagggaagttgcctatatagggaaattcttcaaagcgagcgcaagcatttaaagaatgaaggatggtgcgcccccttatctagtataggccaacgatgttaatgcccagaatctactttcccatctgtctgaatgatggatggatggttttctccccatgggggaggggcaatcgagacgcataccaatgcgactgccaatacgagcaatccctttttcattcctgatcgactcctagcttaaagaaattttgccgcgcatggtaggcaatttttaaatactttaatgctaaatcttcatggccgatttgttcgaaaaacgcgctcgcttcctcggcgatttcatcgacttcaaagtccatgccacggtcttcaagatcttttaaagctttgtcaatgagtaatggatcagagtctacatacaaaccggtcgtagctaaacactttgctttgtattcatgattgtcaaaatagtgggcgcctgtataagcttttttcaaatgaggcgctgcttcttccggtaaatttaggcgatacaatgtattggccaagtcatgttcgcttttggctccaagaatgtggttgcctagttctttaacagacaaggcctcttcaaaataacgctttgcgcttctgtaatttttttgtcttacggcatttaatcctagtgcccttaaggcaatcactttggccgttgaatggtttcctgccgccaacatcgcttctttaaatagaagcgaggctttcttgtgctcccctgtttctgaataaatgccgccaagtattacttggcagaagacaaccctttctgtgaaacctaaacgcttgaatgcctccaacgcttcttcaatgtgggaggcagcatacgggtattggcttatccgatacaaggaagaacccatatagtagtggaaatcggctctttcggctttgtcttcaacattttcaagcaaacgctctgctttacgaaaaagacgaatcgcggagcggtaacgttcgttcataaattcattttggccactaacaaaaaaatagagatacttaagcaaatgatccattgagttttccgcaacactggcttgctgcatagcatgagggtcttttccgcctttgcctacttggttcatcatgatatgatggcgaaacgcaactaatgaataataggatagcattcggtcatttggttccatttgttcaatcatgccatcgacttcttctttaagctgaatcgattgttctacggaccgggcaataatacagctgtaccattcaacaattttagctccgacttcttccggtgataaggccacagacatattcaacgtcccccctctggatcgacgacgacatcgttcatacgtaaattattatagtagtaaaacagtagtagagtaagagttttttattttctcaacaaaaacgcgaaaagtagaaatacgagtccaatcttgccccgaaaagccgagaaaagggagctttcttacatgcgctccttaagcagagagccaatcgcgcaccaactatgtatgcgtctcgtaacctcgatacgataaagcatatgagaggcttttccctcgtattcgtttttccctttcttgagggtgccactctctgcctaggtgtgtggatgaacatttttcgcttaatttcgcttcctactaggcgttcgccatactccttgcgagttcctctgttgttagtcccgacgaacacccttaatggcttttctaaacgaatatgtgcctcgtgaaaaggcagtcatggcgacgttttgcaattattttcagaaaaattgttgacggttttatcgtgcgcagctataattttcatataaggaaaattaattttcactatgtgaaagtagttgataagaatggaataccaaaacaaaagtttgcgaaaagcgtttgaaatcattgagtcgctctgcgccaaaccgatgacagcgacagagttgtcaaaaaagttaaacttgaatccgagcacattgcatcgttttctggccaatttagaggcgatggggtacacggaaaagttgaaaaacaatcaagtccggttgacacaacaatttatccagctagggaaaatggcgcaagcccattatgatgttgaggcattggccaaaccttatttaaaaaagcttgctgacagtacaggggaaagcgtcttgctgtcttcgtttcaccagtttaaagtgacgtatttggacaaaattgaaagctcgcaaacagtgcgaatcgttctagggccaggaagccacgcaccttcttatgcagtcgcgtctggaaaactgtttttgtcacaattgtctccagagcagcttgatgatttttttgcaaatacagaattaaaggcttatacaaagaacacgtttgcagatgaagtgcaattaagaaaggagttggtgcacattagagcgcaaaactatgccatcgatgaggaggagtatgaaattggcttaaaaggatttgccgcgccaattagggaggcgacaggcacgatgatcgcggcgttaagtgtggccggcgtttccttgcgttttgacgatgaaaaaagcaaagcgacgattgaacaattgcttcgttatgcggaattgatttcgattgacttaggatggaaacgttagagaggaggagcgcttatgggcaagaaagcgcttagcattattttggtagcgcttacactatttcttgggagctgtagtgaacggtccgttgctggaaatgaaaaacgacattatgaatggaaaatgacggttacagtaggcagtggctcgacttggtatgaagcggccaaaaaatttgccgatgacgtggaggctgaaacggatggcagaatcaccatagcgattttcacgaatgaacagttgtcagctggaagcccggaagcgggagttgagcagttgatggatggaacgaaggatttctcttataattccagcattatctacgcaggcatcgatccacgatttggcattttgagcgcgccgtttttaataaacagttatgaagatgcagaacggatgctcaatggcgaatcaggagctctgattaatgccatgctgcgtgaaaggggcgtcgaacctcttggctttgcggaaagcggatttcggcaagttacaaatgacacacagccgattaaaaagccagaagacttaaaacacttaaaaatcagggtgcctagtatgggggtgtttacgacccatttccgcaatcaagaagccgacccgattacaatggctttttctgaagtgtacaccgctctgcaacaaggcaccatcgatggccaagagaacccagtcgatgtcacctattcttctgggctttcagaagtgcaaggctacatgacgatgtggaattacgtgtatgacgctttaatccttggcatgaataaggagttgtatgactcccttgatcgagaagaccaacaactgatttcaaggctagccaaggaagcgaatgcgtatcaaatcgagattgcaagaaacaaggaagaaaggcaattagaagagttaaaggaaaaaggaatggacatttattacccaacggatgaagaaattcaacaatttcgcgatgctgctcagcctgtatacgagcattttgaagacatttgggggaaagaaaatatgcaaacgtttctaacagaggcggctgcacaagattagggggagtatatttgagaggcttggctattttagaatatgtgttggttgccgtctcacttgggacgatgtcggtgattacatttgccaatgtattatcccgctacttgtttcatacttctttctcgtttgctgaagagataacgatcaatctatttgtgttgatgacgtttgttggcgcgtcgattgcgattaaacaacaggcacacttcggttttcgctttatctatgacaagttgagcggcatgtggaaacgagtggctttagcggctacgtgtttggtgatgatcgtttttctcagttgcatgttttacttttcaatggaactcgtgttggcacaggcagaacggggccgtgtgacgccagctttaagtataccgcagtggttgtttacttccgcgattcccctcggtagcttgctctgtttcataaggacggttgaaatgtgggtgaccgaaagcaagaggctcacgcaagggggagagaagcagcggaaggtggaaatggcggcgaaagaggtgaatcggtaatgttatcggcgttgctctttgtattgttcttctgtttgttgttgatccacgtgcctgttgcctttgcattaggtgtatcagctttggtcattctcgtgttgggctcggggttttcgtcgttggcgcttctccctagcattatgtattcctccatttcttcatttacgttattggcaattccgtttttcgtgttagctggcgtcattatgagctattcgggcatttctaaacggcttgttgactttgcctacctttgttttggccacaagaaaaacggcatcgtcatcgtcgccattgtcgctgcgttgtttttctcggctatttctggctcagggccggcgacggttgccgcaatgggcgcgatcctcatccctgcccttgttaagaatggttttaacaaaaatagtgcttcggcgttgattgccagttcaggcgcactaggaattattttgccgccaagcattgcctttatcatttttggcgtcatagccaatgactttgttggcatctccattagccgcctgtttgtcgcaggcatcataccgggtcttttacttgctgccggtcttctcgttgccagcatttttgcaagtaagcgcgtttctcacttgcaaacagctagcaagcgcccagatgaagcggcagccagcgtggaacgcgcctctttggcagcaattttgaaagcgttttaccgagcgcttttcgggttgcttgtccctgttatcattatgggcggtatctattcaggcatgtttacgccaacggaggctgccgttgtcgcggtgttttatgcactgctcgtcggcggggtgttttaccgagaaataaaactgaaacatctcggccgaattttagtcgattcgtctgtacaatcagcagtcattatgttcattattggcactgcttcattgttctcctatctcgtgacgacgcaacatgtagcggaagggatgacgcaagctgtgctagggatgacggaaaaccgcgtcctcctattgcttctgacagccgtgattttgttggtgattggcgcgtttatagacgccatttccgcattttatatctttgtaccgattttgatgccgattttgcttgaagtcggcgttgacccgactacgatcggcgtgctcatgacggtcgcattggcaattggcctgtttacgccgcctgtcggattgaatttatttgtggccagtggcatttctggtgtgccatctgaacaaattgtaaggggaattggtccttttctagtctcttctattgttgtgttgctcatcgtcatgtatgttccagctgtatccaattggttgccagatttattgaatctttaaataaaaaggagtgggcagaaatgtcgaaaatggcagggaaagtctcaatcgtaacaggagcagcacgggggattggcgctgctgctgcgatcgaattagcgaaggaaggagccgatgtcgttttagtcgatgtgctgtcttgtgaacagacgaaggaaacgattgcaaacgatgtcggtggggcagaagttgtttgttatgaggtagatgtaaaaaatcgcgatgaagtggaaggcctgatgaaggcggttaatcgacgattcggacgcattgacgttgtcgttaacaatgccggcacttgttgccgttacgacttagagtcaatgacagatgaaatgtggcatcgagacatagacaccaatttgcgtgggacctttttaatgacacaaacagcgatctatccgtatatgaaacaacaaggcaacggcaagatcattaacattagctcgatctctggtattatgggcggcccttttgcttttaatgagggcgagagagcagagcgatctggaccagcttatgcggcctccaaaggcggcgtgattgcgtttacacgctgggttgccaaagaagtgggccggttagggattacgtgcaacagcattgccccaggaccagtagcaaccgagatcacgaaaggaatgaactatccattggccaatcaagtgatccaacggatgggcacaccagaagatattgcagcagccgttgtctatttagcgtctccccaagccgactatgtgacaggggaagtattaaaagtatgcggaggaagtgcaatcggataaaaagagggagtgatgaaatgaaggagcgtgtgtcccatctctttaaggcgtcggagagccaaacctatttcggttcgatttgtgcgggagaagacttgatggacaaaatcattgagttatgcgaacaacacggcattcgttcaggaatggttacctgcattggctcactgaagcaagccggtttcacggtttttaaaatgaaaaacgggcgtacagacggctatgccccacctaccgttattgctgagccggtggaactaattcaagcaacagggtttatttgtgaagatgaacatggaaaactagatctccatttgcatggcatcattgaaaaacaagatgaaacggtatcggcgggccattttttaaggggttacaacaaagtatgcattacggcagagtattgcgtcattagtgctggccatgtaacgggaaaacgtcactatgatccgagtttaggttacaaagttatcaactttcaccatagcggtgtaggaggggattaaatggaaacgattggggcgctcgccaaaaaagccatgctccagcatgtggataacgttgccgccagcgacgaagacgggacgcttacgtatggccagttaaagaaacgcgcctgccagctcgcccatgctttaatgcaaagtggtttgaacaaaggggaccgagtggccacgctcatgtccaaccgcaaggagcatattgaaatcgatgcggcgatcgcatttgccggactagtgaaagtaccagtcaactacaggcttcacccaaaagaagcgacttacattattgaacatgcaggagcgagcgtcgtcattggcgagaggcagttgctggcaggcctctccgccaacgttgaacgaatcgacgtggaggaggcatacgaaccgtttttgcaaacgcaaagcgatgattttcctgatgtcgccgttggcgaagatgacctttttgcgattatgtatacgtcaggcacaactgggaagccgaaaggggcgatgctgacacaccgaaacatggtagcgggcgcactatcgctcatccaagcctgtgagatcacgtatggcgacaccatcgggcatgtcgccccgttaacgcacggaacgaattttttggcgcaaaccgcatggttctatgggctcaagcaagtcgtatttaaaaagtttgagccgagcggttttatcgatgaattggaaaaacagcaagtgacggtgatgttcatggtgccgacactcgtcaacttaatggttcatgacccgtgctttgaccctgttaaattgcgcagcctgaaatcgattaatatggctggtgcgccaattgccgtccctaaattgcaaaaagcattaacggcgctcggtccaaagcttgcggaaacgtatggcctcgttgaagcgccaatggcgatcacgatcatgccaaaacagcagctcggggcgaggccgagctcttgcggagcggccgggccatttgcagaagtgaaaattgtcgcgcccgacggcgaagaggcgccggttggcgacatcggcgaagttgcctgccgaggctcgcttgtgatgaaaggctattggcagaatgaaaccgcaacagctgaagcaatcaaggatggctggttttataccggcgacttaggccgtcttgacgacaaaggctacttgcatcttatggatcgggccaaggacgtcatcattactggtggcctgaacgtctatccccgggaagtcgaagaagtgctcaatcaatatccagctgtgaaagaaacgtgcgtcttcggcgccccggatgaaaaatggggagaacggatttgtgcccatgtcgtattgcaggctggcgccgcccctgtcacggaaaaagcgctcattgcccattgcacggagcatttggcccgctacaaaaagccgaaagtaattgaatttgtgcacgaactgccaaaaaacagctacgggaagataatgcggaaaacattgcgaaaccaatacaaaaaggcaggtgtctgaatatggcgcacgtgtccgtaaccggcactggacgaacggcgtttggaagaaagagcgaatcgattaaagcgctgttggtagaagcgagccgccaggcattgaccgctgctggccggccgaaaatcgatgctgtgttcgtcggcaactttttaggcggagtcctttcacagcaagaaattctcggtgcgatccttgccaatgagttaggcttagggcctattccagccatgaaagtcgaaggcgcctgtgcttcgggaggcattgcttttaggcaagcgtaccaactcatcaaagctggcgaatacaatgccgttcttgtcgcaggtgtggaaaaaatgacaaacgttgatacagagaccgtcaccaatgcgattaacgcagcgatggacgccgaatcgaacgaaagcgcgacggggctaacgtttccaggttattttggcgctgtggccaaccgctatatccacgaatatggtgcacaacgaaaacatttggcgatggtcgccttaaaaaaccggatgtacgcccaagccaatccaatcgcccaatttcaaaaggctatttcgttagaagatgtgttaacggcaaggcccgttaccgacccgttgcggttgctcgactgttcaccgatttccgacggagcggcagcagtcgtcctgaaaaaaagcgaatcaggcgtccgtgtgttgtcatcaggccaagcgagcggcacgccgctcatgcaagaagtcggcaacttgcttaggatcgaagcgacacatcgtgccgcccagcaagcttatgcacaagccggactcggtcctgaagacgtcgacgtagtcgagcttcatgactgtttttccattactgaactgattgcgattgaggagcttggctttgcggatagaggcaaaggctgggaagcagtggagcaaggcctgactcagcatggcggcaatgttcctgtgaatacaagcggagggctgttatcaaaaggccaccctattggcgccacaggcatcgcccaaatcgtgcaaatcgcagaacagctaaatggcatcgcctgcaaccaagtagatggcgcgcgcattggccttgcccaaaacctaggcggcactggcgcgtattcggttgtccacttattcgctaaggaagggagctaaagagcaatgaacatgccagcaagccgctgccctgattgcggccgtttatttcacagcggaaaaagctactgtccggattgtgaccgtgacacgctcgattccattgacttaaatggcaaaggcaacgtgtactcgtatacagaaatttatgcagcaccaaaacgattcgcacaacaagccccttatttgatcgtactcgtcgagatggagcacggcctgcgcgtgacaggaaggatgttgaacgggccggtccagataggcgatcgagttgaattgcacaaagtagaagatcattgttactattttgctgcgctttaatcgagaaagcgactgatcggagagctataatccataaaaccccagtcggaacaaaaaacgcccaactggggttttgctattaagaagcagtcgccgggctgctttcggctgttgccgttttcgcattgtttggcagtgtaatgaactttgtcaaaacagcgccaagcaaatgaaggccggcaatgagccaaattaagcctgttacgccaataaagtcgaaaaacaaaccgacaagcaaagggccaacaaatacgcacaggccagcgcctaaattcaaaatcgccatcgccgcgcctttgtcttcttttactaatgaaggaactaacgcagataatggtacatagccggcaatacaggcgccccaaaggatgccgacaatttgcatggcgagaaagttgccgcctgttaacgctggtgtataaaagaagacgactgtgaagatggcacagccaacaccgccaaaccacatcactgtattgcgccagccaaatcggtcgccaatcaggccggaaagaaggttgactgcaatgttggagatgaaaatcgtcccccataaactaagccaagcggatgtactgagcccatattcgaccgcaaaataagttggaataaacactggaaaggcgtactggcctgtttggttaataatgcggacaagcccagcgatgcccactttcggctcgtgtttaatgattgtaatcccttttaacagctctctccacttcgacgttccgctttttgcttcttggcggacgattttgtcacggttaatgacgagtgcaaacaaggctccaagcccaatgaacaaaagtgcactccaaagtgtgttgtgatgccctaaatgttcaatcgcccaaatggaatagtaagcgccaagcacgtttaaaccgcctgtgaaaacaaaccaaaaccaacctacagctgcgccaagttggcgttgcggcgtccggtaggcgatccaaacaaggaatccgtaggcaaagagagggtagccgaatccccgcatcgcgtatgtgacgagcatcaacgggtaattcaagtcgccgattgcaaaaccaacaaagccaacggtgccaagcacatatagcaagacgccgagaaacatcgtttttttcgcgccaagggcttcaaataatgtgcctgaaaaccaagacgaaacggcaatagtcacgccataggctgtaaataagtaagccgattgctggacagaaagcccctgttcaactaagtaggggcttaaccaaccaatttcaaggccatcgccaaccataaaaagcatgacaccgacatatccccacagcaaatgggaaggcaagccgactttgtttattaaatgggtcatagcacttcctcctcgatcttcttatgcctgttgcggctttaaaataattttgagtgaatttgaaccatttttcataagctcaaacccttcagcaaaccgttcaagaggaagctcatgtgtgacaacgccttctgtcggcaagtcgccattggcaatgccttcaatcactagcggataacagtatgggcctaaatgcgagccaaggacatccagttcttttcggtcgctaataatgctccaatcaactgtgacagggtctttgaaaacgctaaattcgacaaaacggccaagtttgcggatcatgctgagcccttgttcaacggaagcagggtggccagttgcttcaatatacacatcgcagccatagccgtctgtcatgtcttttaccctttcaacgacgttgtctttggctgggttcaacactacatctgcgccaaattgtcgggcaagcgctagccgctcatccttcatatcgagaacgacgagcgttttggcgccagactttttgacggcgccaatcatgccgaggccgagagtacctgctccagaaagaacaacgatgtcgcctaattcaatccgggcccgctggacggcgtgcatgctgcacgcataaggttcaattagaatcgcttgttcgatcggcaaatctgccggcactttgtagttgatcgcctcttttgtgaatttcatatattctgccatcgatccgttgacattgttttggaatccgtataagtcatgtttttcacacatccagtactggccgcgattgcaaaaccggcactcccagcacggcacaatttgttcggaaatgatccggtcaccgatttcaaagtcgccaaccccgtcgcctttagcgaccacatggccgataaattcatggcctggaatcataggagctttaatataagcaggttgtgtgtcatcgccccaaaaacttggcgccccgtcgaatgctttgatatcgccagcacaaatgcctgttgcttctacctttacaatgatttctttgtcgttttcaatcaccggcacgtcgacttcttccaatcgataatctttcgggccgtaagcgacaaccgctttcatttttttaggaattgaatcgttcatcgtgttttcctcctgtatgtgcttaatcgtttaccatgtggtatagccgccatccacaacgatgatggagccagttgtaaaactagatgcgtcagatgctaaataaacagctatgccgcttaattcatctggacgaccaaggcgtttcatcggaacgtggtctaggatgtgttcgagctccccgccaggcgcgaataacggccctgtcatttgcgaggccatatagccaggcgctatcgcattgacacgtatcccatattgcgcccattctgaagcgagtgatttggtcagcatactgaccgcgcctttagaggcattgtacgcactctgtgcttcccgattggcaatcatcgcagacatggaagacatgttcataatcgagcctgacccattagcgaccatatgtttgccaacctgcttagatgttaggaataaagcgtttatgttcacatccattgttcgtttccaatcgctgtatgtcatgtccaatgtatcgattttctttacaatccctgcgttattgacgagcacatcgattcgtgggaatgattccaatacacgatcaaccatgacgctgacttcttcctctttgctgacatccgcttgaatcgaccgtgtgttgaccgaataagtagttgtaatttcttgtgctgcctttgcagcagcttcagcgtcaatgtctacaatcgctatgtcgcaaccgaaggccgctaatgactttgcgattgtaaaaccaaggccttgggcaccgccagttaccactgcatgtttcgtcgataaatcaaatatggtagatacggtcaaacgaccacccctttcgtaagcgttttcaaatcagatattgaaaatcataacattgttttcgtttatgtcaatatttttgttgaatacttttgttttattttatttgtagtcatattgtgtttgcgtatccattcgttggtttaatatagtaagatacatgataagtgaaaaagaaaaaaggtagggcgtgccatgaaaaaaatgtttgtagcagaacgaagagattcgattttggatatattgcgtgaaagcaaacgaataacagtaaaagaattgtcggagcgcttaaatgtctccgaagcgacattgcgtatggatctaaatcaattagagaaacaaggaaagctggagcgcacccatggcggggcgattttaatcgatgacatgccagctgtgagcgaaaaagagacaagcttttcctatcgaaaacaacaaaatacaaaagaaaaaacattactagcggaagaagcgagcaaaatgctgtccgatggagactgcattttgctcgatgctagttcgaccgcacttgaattggcaaaagtcttaaatagcaaaacattaaaactcacggttgtcacaagcggtgtgtatacggcgcttgaattgcgagaccatccgacgatcacagtcattttgcttggcggcgtattgcggaaaggttccagctcgctagagggattgctcggagcgtcgatattagacgaaatcaatgtcgactatttgtttacttcggccaacggattttcgaaatacgctggtttaaccgattttaatgtgtatgaggtggaactgaaaaaacgcatggttgaaaaagtcaatcaagtcgttgccttaatcgaccatagcaaaatcggcaaaacatcaatcgcgacgtttgcccagctggatgaaatttcactcgtcattacaaacaaggaaatcgacgctgacttttcagctgttttaaccgaagctggcgtaaaagtaatcaacacaaacaacaataaataacaacaaacgaaaataaatgattgacaaaaacaatctgttttgcaaaaatggagctaaggaaagggtgaaaggggttacatcaagtgaaaattgcgattggttctgaccataatgcgtttgaactgaaagaagaactaaagacgtacatgatagatgagggctatgatgtcgttgattacggttgccactcttgtgaagcagtcgactacccagatgtttccttccgcgtcggcaacgacatcatgaaaggcgagatcgaccgtggcatcttaatttgcgggacaggaattggcgtcgcgattgcagcaggcaaagtgccaggcatccgtgccgccctttgccacgatacttattcagctgaacgggcgcaattgagcaacaatgcccaaatcttgacgatgggcgcgaaagtcattggcccagaagcagctaaaaaagtgttaaacgcttacttaggcgcttcatttgcaggcggtccctcggcgaggaaaatccaacaaatcgctgagcaagagcaggcataccttgagcaggaaagcaggtaagagaaatgaaaaaactcgtaaacaatcccgatgttgttgtggatgaaatgatcgatggctatttgaaagcgtttccgcagttagtggagaaagtcgagggaagcgggcgcgcccttgtcgccaaacagtcccttcatggaaacggaaaagttggcatcgtcataggtggcggttccggccatgagccagcgtttatgggctatatcggccgtggcatggctgatggcgtggccgttggaaatatttttgcttccccaccgccacagccaatcgtagaggcgaccgaagcagtcaatcaaggcaatggcgtcgtatacatttacggcaactacgcaggcgacatcatgaatttcggcatggcttctgatttagccgatatggagcacgacataaaagtagaatcgattatcgtccgtgacgatgtcgcttctgcgccaaaaagggaaaaagaaaagcgaagaggaatcgcaggcgaattttttgtcactaaagtggcaggcgccgcttccgccaggggcgacgacttaagcgaagtcgtccgcttaacgaataaagcaaatgaatcggtgcgcagcatgggagtcggattgacgccgtgtgcattgccgcaaacgggcaaaccgagttttgtccttggtgaaaacgaaatggaaatcgggcttggccaccacggagagcccggtgttgaaaaaggaccgctgcaacaagcggacgatgtgtgcgaccgtctcattgacgacattttaaacgatggcgaccttaaagctggagacgatgtcgccgtgcttgtcaacggactaggttccacgacgcaaatggagctgtttattatgttccggagagtcgaacagcgcctgagcgaaaaacaaatcaacatccaccgcagttatgtcggcaattacagcacatcaatggaaatgggcgggtgctccgtcacgctaatgaaagtggacgaagaactaaaagcgctcatcgatgcgcccgccgaatgcccgctgtatgcccaatacgagtaagaggtgacaacaaatgatccaagcgacggatttaaagaaagcgctttactcaatgcgcgacaaaatggcagaagagcgtgattatttatgtgaattagaccgccacctaggtgatggcgaccatggcgtcacgatggacattggctggaaagcagtcgcgcaagcgctagacgacctcgatgccgaaaccgatattagcgtcatttgcaaacaagtggcgatggcgtttttaaatgcagtcggttcttccgtcggccccctttatgcgactggttttttgcaagcaggcaaaccgtttaaaggaaaaaacgctttaacaagcgaagacgtcgccaccttttggattgcgtttgcagaaggaatagaagcacgaggcggcgcaaaaataggcgataaaacaatggtcgatacccttgcaccaatggctgcttatttacgtgagcgaggaggcgggttcgacggcgaaggagcgcttgccgccgccaaaaaagggatggaatcgacaaaaaggctacaagccaatgttggccgctcaagccgtttaggagaacggtcgatcggcacgatcgatcctggcgccgcttcagcgttcttgctattcaaagccttttgcgactcagtccagcctcgagaaaaagtgtaggtagacgaaaatgagagactttctattttcaatggcccacgtaaccgaacaagcagccgtcgcctcctttccttggatcggcacaggcaataaaatcgaagcagaccgggcgagcaccgaagcgatgcgggcagcgctaaaccgcattccctttcgaggcagaatcgcgattggcgaaggagaaatggatgaagcgcctatgctgtacatcggcgaaattgttggtaacggaagcgggccgctgttcgatctcgctgtcgaccccctcgacgggacaacgcctgcctcaaaagggcaaggcgactgcattgccgtactagcgggagcaccacacggcacattgctccatgccccagacatgtatatggaaaagctggcgactggaaccgaagccaaaggggccgtccatttagacgcgccgatagaagcaaatattcaagccgtagcccgcgccaaaaacaaggcagtcaaagacgtcacagtcattgtccaagaccggacacgccatcaaaaactcgtccaacgagcaaggcacacaggtgcaaaagtcaaattgttctacgaagtagacgtgacggccgcattagcaaccgcattgcccgaccacgacatcgatttattcgtcggaatcggcggcgcaccagaaggcgtcgtagctgccgcagcgataaaatgcttaggcggcgatttccaagggcggctgcttccagatgaccaccaacaacttgcccgctgccagcaaatgggcctcgacaaccccaatcaattactgaatcttcatgatttagtcgcctcacaacaatgtttttttattgccacaggggtcaccgacggcctacttgtcgatggcgtcaaaaagcgcgaccaaggcgaactcgccacccacacctttatggtcgacggagtggcgaacgaaatccgcgttgtccaaacgatccatcgtcctaaacaagtattgatgaaataaggggaaaagctccacgtgtgtagcgtggggttttttcgttgggagggggatgggcggaaaggaaggaaactagttgttacgctcaggtattgatgcttttaagctacactaatagaaaatgcctagtggggctcactatgaaaaatgatgactttgactagggctaacttatggttttatgtagaattcaacctgagtctccttgttagaagtcaatgatctttgacactccacatcctaccaaggggctctttttatttccatcctctcagaaccttctaacaggaagctccttttaatagggaactttcgctgtcgcactccatgtaagtttgaatttcccatctcgctttccttcaatcgccaaagcgtgtcggcgaacctttttgatttggctttttataagagtttggctgttaaacagcgtcagcaactttctgaaaaaagcgcttgctgattgaaatacattcggttatacttccgatataggaaaacgttttatcataaatgtagcagttgtattgcttgctcaagcgtttttagaggactattttcaactaaaactgaaaacgttttccttttagtataaggaggatgatgatgtgaaacgactgtatgggattacaacagcaatggtcacgccgttcacagaagctggagaagtagatgtgccgtctgtgcgtgctctcactgatttcttgattgagaaaggggtgcatggcttatttcctttaggaacgactggggaaatgaataaattgagtattgaggaacggaaacaggtagctgaagcggtcattagtcaagcggctggaagggtccatgttttcattcaggttggtgcccagacaatgggaagcacgcttgaattggcaaggcatgcgcttgaggcaggcgcggacgggattggcgttgttacgccattttttctcggtgccgatgatcgggaactggaagaatattatgtaacagtggcaaaacagttgccggatgattttccggtgtacttatataacatcccccaagcatcagcgaacgatttgaagccagaggtggccgaacgcattgtgaggcggactgaaaatgtggtggggatcaaatacagctatccagattttgttcgtttgcaagaatatagttttgtaaatggtggtgacttttctgtattgacaggaacggaccgcttgttgactgctgcactagctttagggtgcgacggcacggtatccggggtttctggcgtatggcctgaaccctttgtcagagcatatgaagcgttctgcatgggcgatttagaaacagcaaggacgcaccaatcggtggcaacggcttattgtgtagcgttaaaaggaggaagcaacatgtcgtattttaaggaagcgcttaaaatgcgcggaattgatgtaggcggcatgaggcgtcctcaattggatttgacggcttctcaactgagcgagttaaaaagcgcattgaagaaggtggagtctagaaatagcgatatcaattaatagagatttagcaagtctgctcggactattataacggctgtgcatgattagggagggtagataaagatggacaggcttacaaacctttttataagcattgtggctgcgttatgtttagcgagttgttcaaaccagagtccggaagaagctgctgaacgttatcctgaagaccaagtcagcctcattgtcccgtttgcaacaggaggggcttcggatgtggtgtctcgcgctgtggcaatggcgatggaggaagagttaggtgtccctgttgttgtcgtcaataaaactggcggggtaggggctattggcgtgtacgatgtcatgatggctaatgcagatggctaccgaatcggttatgtgccagtagagttagtgatgtatgacggattgcaaatcgccagcatttcgccatatgaatttgcctatatcagtaggctaatggaaattccggcagcgatcaccgtttctgccgatgctccgtataatacgctcgatgaatttatcacttatgcgaaagaacatccaggcgaattgcagatcggtaattccgggacaggatcgatttggcatatagcggcaggcgcacttgcccaagaagccggggttgagttcaattatgtcccttttgaaggggcagctccagctgttggctcattgcttggcggtcatattgacgcggtgtccgtcagcccttcagaagtaaaaacggggctcgatagcggcgacttaaaagtgttaggagtcatggggaacgagcgagatccagtggttcccgatgtgccgacgatgaaggaacaaggttatgatgtcgttttaggcggctggggcgggtttgtcgctcctaaagatacaccggaagaaatcattgccgcgttagatgccgcgatcgaaaaaagcatggagacggaaaccttccagacattggcagaatcaagggggttgacgccagcttatttgcctggccaggcgtttgaagcgtttgcggtggagcaatacgaattctttaacgaattgatccctagcattgaaatggagtaggagggacaagattgaaaacagcgaatttgctactcaacggtacaattacggttgcatgtctcatctttttttatcaaacgtttcattttccaatgctttttggcattgaagattccgggcctgccctttttccaagaatcgctttagccgcccttcttttgtttgtcataattgatagcgctgtcataataaggaaacgagatggcgagttctttttcacaaaagaagaaagaggaaacctttggagattagcgcttttaattggtttgttggttttctttgttttctttttaggaaagctgccgttcttgatcttgtcgcttgtaacgatgtttttgattggtttggtgtttcagttaaagtgggggccggctttgctgacagcggttgttttgacgttctttatccaatttgtctttattaaagggctcaacattatcctgtaggaggtgcttataaatggatacagtcatgttggttttgcagccaggggttcttttttttatgctacttggaacgtttcttggcctgtttattggcgctttacctggcttaaccgcaacaatgggggtagcggtgctaacgccgctaacattttggctcgctccacaggaaggattggctatgcttattgcgatttattgtacggcgatctttgcctctggtattccggctattcttgtgaacacgccgggaacccctgcttccgtgacaacaacgtttgatggctatccacttacgcaacaagggaagcaaggagtggcgcttggaattaacgccctttattcagggcttggtgggctggtgagcacggcgtttttaatctttgcggctttcccgatttcaaaggtggcacttctatttggccccgctgaatattttgctttagcagtatttgggctgacgattatggttagcgtctcttccggctccattattaaagggttgatttctggtggcatcggcttgtttattgttacaatcgggctcgacccgatccggaacattccccggtttacctacgattatccgcctttgcttgaagggttgtcattcattccgattatgattggtttgttcgggcttgctgaagtgtttagccaaatgctttccaagcaaacaacgaagactggaaccactgagaaagtggggcggattcttccgaataaagcggaacgaaaagaagtccggaaaccgttttggatgtcttcgatcctgtcgacgtgtattggggtcatccctggagccggcggtgatattgcttcgattatttcctggaaccaagccaagaatatggcgaaaggagagaaaaaagccgagtatggaaaaggctcccttggcggactaactgcctcttgcacgtcgaacagcgcagtcattggaggcgcgtttacaacaatgatgacgttgggcctgcctggggatgctgttacagctattttaatcggttcattgatgatgtacgggcttgatccaggaccggcgctgtttactgaaaatatagaaatggtccatctgatctttgcgctcttgattatctccaatctgcttgtaattgtggttgggttgcttggttccaatctatttacaagaatcattcaaatacgccaagaatttattcacttagcagttgtgctgttttgtatcgtaggagcttacgcgttgaataactcttattttgacgtttgggtgatggtcattgctggcttttttggattgctcttcaaaaaattacgtatccctcttggtccgctcattttagcccttattctcggaccattggctgaagcgaatttccggcgcgcaattatgattagcggaggaagtatggatatctttttcactagtcctatcgccatagccttatttgtcatagctggactttcagttttaattcctatgtttagacgaaaccctaaaaataacgccccttccgcttaaggaaagggcgtttggtgtgtcaggtgcctaggcgatgcactacttgcttttttgtaggcatgccggattgtgctcctgctttttcaacggaaagcgaggcagcggcgttggcgaaggacactgcttcagctaatggatgttcggatgccaaagcggcagcaaaggcaccgttaaatgtgtctccagcgccagtcgtatcgacagcttttgctaaaaatccattgacgcggacaagacggttgccatcatggtaggtggcgcctttttttccttctgtcacaatcagcttattgggatagttccgaaccgcttgttcaactggttgtttaaagatggtttggcactctgtttcatttggcgttataaagtcgactagatcaagcatggacggcgacaactgttgggcgggggcagggtttagaattgtggtgcattgttcttccttgccaagttttgcgatctcttcaataaaaggcagcggtacttcaagttgaagaagcaggacttttgattgccgcaacagttcccggtacagccctgcatcctcgcgcttccagctaaaattagcaccaggagcgaccacaatagaattgtcattatttgtgacagtaatcattgccacgccggtatgtgccgcgttgtccacgtctatgtagcctgtttccacttgttcgtttctcaagttctcagtcgcaagctttccatacggatcattgccaacccggcctaccattgttaccgcagcacctagcctggcagcagcaacggcttgattggctcctttccctcctggattggttcgaaacttgtcgccgagcacggtttccccaggcacaggcatattacttgtgtaaacgacaaggtcgatgttgatgcttccaacaatggcgattaatgcaaacgcctcctttcccgaatacctctattttacaataaaacgttttcctgaagtaagtcctcatatcataactcgtataaaagtatcttgccttttgtaccaactgataaagggtaaaatatgataaaatagatacaccaaatgagggaatacgtaaggattttgtaaaacgttttgtgagagggtcgattgatgtgaaagtgacgattaaagaagtggcacgtcatgctggcgtatccattgcgactgtatcgaaagtcattaataacagggattatgtcagcgagaaaacacgcgaaaaagtcaaaagagcgataggggaactgcaatacgaagttaatgcaaacgcccaaagcttgaaggcagtgcgttccagaaaggtagcggtgctcgtctcggatatttccaatacgtatttaatgtcgattgccaaggcggtagaagaaatgatccgctccatcggctaccatatgatcttgatgagccataacgatgcgccagatatagagtatgagcttttgcagattgtgcaacagcaacaagttgatgcaatggtgttaatccctacaggagaaaacagtagcacgattaaacggatggtgacccttggcgtacacgtcatcgccgttgatcgaaaagtgaacgatttgcagacagactacattgccgatgacaatttttacggttcatatgaatcggttcgttatttgcagtcgctcaggcatcagcgcattgctgtgctctatggccaccgccgaaattccattggcgaagaacggtatcaaggcgcactggcagctttaaaagaaggaaacacatacgacccgactctgtttcgtggagcgaattttaaagaagaagaagcctatcgcctcaccactgagttgctatcactcccggaacctccaacagcaatttatagtgccaacaatacaatgacccttggcgttttacaggccataaaagaacggggattggaaatgcccaatgacatttctgtgattgcctttggagatgaaacgcaatggaaactttttagaccaaagctaacactcatggtccaacaagctcagcaaattggccttgaagcagcgattatgctaaaaaaccgtttaacaatagaaaagccttacccagtgcaagagcggattattaagccggttttgcaacaaaatgagacgtgcaacgtgcttagaggacattaatgggcattggggtggggctaagaacgaaaaaacgttttgatatcaccgttatcgacggacacgaaagacagcttctccaagttcacggcgttattcctccatttattaggaggatctcgctgtcgcactctttgtgagtaacgactacttccagacgaccaacaatttgcccgctgccagcaaagggacctcgacaatagggctcatgttttatatgaacttattgggtattaatccgcatatgcttgcggaacttgagcgctcaatgatcgttttatatgaacttattgggttataaagaagaaaaccgtgtttacaaaataacgatcagcatccaattttataagacaagcgcttaagctacctcgtatcttcatgaccagaaagcaaagttgtggacggaatcgaactttacaggaaggatcaagacaggtttattcatcctttcattatataaaaaaatgaaccccgtccaaggttcatttttttatgtagattacatgttccatgtaaggcaaacggactactcaatctctttctcttgcccgttgtgtgtccctaatatttttctgaacagtgatggcggcaaataagctaaggacaaaagacatgccataaaatcctttttcgctcagaacaatgctgcctgcattgtataaaccgatacccattaataaaatagcgacaataagtgcaacccaactaatcccataataaatgctcgtaacaggtatgccttcatctttatctcttactgccttttgcaaagatactgatgaatagagtccgaagattaaaacgacaaagtaatatcctttttcgttcagttccatatttgcgttaaacaagccgataaaatacgcaccgacacccactatcaacgcagcccaagtagcccctttgaaggctccagttggttctccctctcttctttctactttgatttcgggctcattttgtttttcattatctaataaaacctcatgctcattagacatgaatggttcacctccgtctttattcataaaatcagcatggcaagtatactgtcctgcctttgcctagctcttattatatagaaattgtatgcaaaaaggcagattattttgttaagatgcttcctttatttgcagaaaactgattcattgtatggaataggattgtgccaaattaacgattgtccgtcttctccatcgggattattcattggcaactgtgatgaccacactacgagagaatacatgttaaagtccatcgcatccgcaacaaagtcgagccgattatgtttgctcacaaggctcttaggccaaaaaaagctaaaacgattttcgctcaaggatccagatgagcagtaaaaacgccctcttcttttgtgcaaaaatcaattgctgtgttacgtttatttagaatggccgagtctttgttcgaatgaaaatagtggtgtcataagcgaaaatgaaaatttaaaaacaagaaagcagggattcgatgttttttttcaaaagggacaagaagccgacaagattggaagtagatgcaccggacggcgcgttggttctgtatccgactgaattggaagaactgagagaaaaagaaggcaaacattttttgttttttataacgaccgatgaagaccaaactggttacattgtgacgtccaagcctgataatgaagggccaggtttgctttttccaattcaggaggaatttgatgtgtgttcagagctgtttttagccatcccccttcccctaagccattcagacagctttgtatacaaagaagcctcctcctatgaagaaatgacagaagcgattgaaatagcaaaaaatgaaagaaaaaggtagcttatgaataattttatgaatgtcatgtctttcctataacgatccatacgaacctttttctttagacagcgccgcatgaagcgctgtctttttttgatcagttccgtttaaaggatgatttcttgtactgaaaaaacaaggtttaatttttgtttaacgggaataaatacagtgcttgctgctttggcaactggcttgaacgtatggtggcgtgcagcaatgggggctagtcttggcttgcaggaaaggaagcagtagattcaagggcgagacggttgttatcccgtgtttttctgctgttttctattgagtcgagtccgaatggagcttgcccctgatcgtaaaaaaatcgaatagcttttttagattggagaggtttgatgaaaagcggtccgataggcaaaaaaagaacaatggaaaacaaaattgtttttccttctattctaatcattgcgattgttagtcttttatttgccatttatactgaagaatcgacgacactattaaatacaatttttgatacgattgtcgatctctttgcttggggctatatgtggtatgcccttttaatggttgtcactgggatatggttagcttattccaaatacggacaagttgttttaggcgatccaagtgaaaagccaaggtatacgttgtttgagtacgcttcgattttagtggcaatgggcgttggcgcaacattgatgcggacaggaatggtccaatggagtgaagtagcggtcgatcccccatttggcttgcaagatggttctagcgaagcactcctaacaggcaacgcctacagcatgtttttatggagtttccaaacgtttgccgtctttgtaatggcagcgccggcaatggcctacatccttcacgtccggaagaagccaaagatgcgtatttccgaagcgtgccgtgttatttttggcgataaattcacggacggtcttggcggcatcgtattagatacgctctttttagtcagcattttagcaggcgctgctgtaacattagggctaggcacaccgattgtgacagagaatttagcagaactgtttaatatagaggtcacgtttttgttaacgatgatcgtcactttaatttgggtgtttgtgtttactctgagtgcctacgtagggttagacaaaggaatcaaacgtttgagtacaatgaatatgtaccttgccggggtatttgctttgtttatcatgattatcggcccaggcatttttattttagatttctttaccgattccgttcgcgtcttggtatcacgttatctagacttttccctctatacaaactccctccatacagagggaggaggttctcatattgaaagccacacagtcttttggtttgcgtacaatgcgacatgggcgatgctccacggtgtatttgcagcagtggtctcaaaaggaagaaccattaaagaaatgattttaacgtatctattagcgccgacgatgctatcgtgggtggcgacagggattttaggaggccttggcgttgagcgacacacaagcggagacgtctcagtgttaaatattgtccaagaacaagaacccgtcacagcagtaccgcaaattttggcgtctatgccgataccagaaatatccatttcggtgtttatcatcattgccacgatcttcttagtcacgacattagactcgacgacgtatacgatcgcgacctatatgtcgacacaagacatgagcaggcgcgccccgtcaaagcatctccgaatatttgtcgccgtggtcattaccgtgcttgcgctaacgctcatgaacataggtggattggcgccacttgaagtgttatccgggttaatgggtatcccaattatcgcgattcaaatactgacgattatcgccgccaaaaaaatgatggacgaagacaaagcatggattaataacgttagaaaagaaaaataggaaggagccatgtaaagcctgccggctacttttgctggcaggcttaagctttgtatttttgggaaaactcgtatttatgagtggctgctgggatagtgtttgtggaattggcgattgcttgcaaagaaaggcatcgatatttaacctataaaaattaaaggcgaaaacatgatataattttttgtagactaacacaaatatagcaaatagccttttatagtgcgaaccccaagcgcacataaaatccctagatcacccgcaccaaaaaagagcttaaatatgaggaagtgtgtgtaaaagtggtgaaatgttgttggtttcccatgatatgataaaggaaaagagcggcttttctctattatttgtggtttagattccagaaaatagggagatttgactgtcgcactctttgtgagtgcgtggattgaaatggtaattttccgaccactgttatgcgtaccgtagtcgcactctttgtgagtgcgtggattgaaatctcaatgccgtccatggaagggtctgctggttcggtcgcactctttgtgagtgcgtggattgaaattttaaagtacggtttgatgaaagaggaaagccgatgtcgcactctttgtgagtgcgtggattgaaatgtattttcaattcgatacaaaaaaagcctcggcacaaaaatgctggggctacagtttttagaatggtatgttacttttgcctgttgatttaaaggtacttaatttcgcctgcagttgaatcaaaatttggtggggtaaattggcaacgatggctggcagttcattctaccaaggtccatttctgaaagatagtctgtgttaacaacaagggaacatgctataattgaaaaacaatagcataacggttactcaagggtggtcggcacactcccatgaaagggggtgttgctgtatgacagtatttgaaggaatttcccttatgtgacgtttgggcttctgatcgttgcaatgctgtcatttcacaaccacaaaaaataatccacccttgagttagtggctcaggtggattattcgtccaatcggccgatcccttgcagggaaccgagctattgtttgactgaaggtgttacagcaccttcagtctttttactttagtcatttcttatgatcagtataccctttttcttaggaaaagaaaaccctattacatatccgacaattagtgaatacgtgggaagaagtgaaaactcctacgtacaaaaacatcacatgttcaattgtcaatttaatttagagggaaaatgtagcctttttctgttgactaattggaagaagatatttctagtttaatagaacccgcaattgagatgttcttttcgcctaaactaatatttaaatcgcatagctttttagtcttttgaactactataaaaacgatctttaagaatgatagagtagaaaaagagggaatattgtctaatttttgctgattttcggcttagcatatggtaaaatatacatagataaatgatattttaagggatttggctgtgtatattgtctgtgcgcgagaaaaagacaagggcgcgggcaaactgctattcgctaattcataatttggtaagtaatctcaaggagaagagttcttgctgaaatgatttaaaacgccatcatttatatcagcctaatgcaagactatgtattgtatctcctacgttagaatttaacttcatcggtcgccctctaatatgggtgcgttaattgaaattaggtatacgatgaagtaaacaaaatccatataaggtagtactcactttaggtgcgtgatccaacctgataaaggagcgatccatgtttgatcatataaaattgcttaccttgagagttacatatgaggcaaagaggtcggggactcttcctccatttttggggacaactattcgtggtgcgctgggccattgtattcgtggatttgattgtcctacgccaagaatgaaatgttttgtctgtccgattgcaagtcgctgtgactatgccaatcattttaactccgttggaaatgaaggtggagctgtcaacccttttgttatacgaatggtgacatacaataagacaagttggaaagttggagacaaactcatcttcgagattactttaattggtgaaacgagcgaccatgccggactttttttagatgcttttcaagaaatggaaaagcgaggatttggggcagaacggattccctttgaattaaaagaggtgagcgatgcaataagaaaaaaacagatatggaagttagggagaatgtcccttcgccatattcagccatctcccctagtttgtaaagaaagagaggcccactcggtaagaatcaaatttcatagtccggtcagagtacaagtgagcaaaaaagtactttactcgctaacatttgcagacatcattcgatcgatcagcagaaggttggcccttttaacacaagcgtatacagataaacagcttaattggaatgaagaggcgatgctctccgctgcatctgacattcagactgaggctcaaagttggcgattaaatgactttaagcgttattcaatgaaccataaagataagcttcatattccggggatagaaggttgggcccggttttcaggtaatattaccccctttacaccattgctagaagcaggggaaaggatacattttggcaaaaatactacccatggatttggcagtttttctgttttttacaatgaagaggagggacacgagaatgtataaagagtcaaaaaggaaaaaagctactccacaagaaacgataagggggatagctgagaattataaatggttagaaaagtcgtatgctaaccagctaggtattcatgcccctaatcatgacgctagcacaggcagttatcgggagaatatttggttagatttgtttgaacgtattattccaaaaaagttttgtatttcaacaggtgtgttcattatggattcataccaaaatgtctcaaaggaagtcgacatagcgatttatgatgagcaatacaccccatacatttttactggtaaaaacaatcttaagtatataccaattgaggcagttgctgttgcaattcaatgtaaaagcgaaaaaataaatagtaatgacgatataagaaaatgggcgcaatcaatcacaaaactaaagacatcgctaaatgctctaacaagaatacagacaagcgtacttgatacaaagcttgataaccttcattctttttacatttcccaacaggaaagaaagaataatggtgtttctaatcaagaaccgattaaacaagtgcaaacttcaacaagacctattttaattttatgtaaactgaatggttctaagacgaaactatcagatacatttgatattgttttgagtataaaccaaaaagaggtcaatgaaaaaggcgagccttatcaaatgagtaagcagattaaatatgaaaaagaggatttgagttactggtataaccaattaaatcattttcagctaggtcgttatggtgaagaagaagaaaccaaactcaaggaaattgcaaatgatcaaatgaagaagtttaagagaaaccttaatcaattacgcgtcgttcaaaatggtgaggaaaacatcacactctcgcttacgttccaattaaaccaactactgatgcttattaacaatccgatctttttccctcatcaatcttatgtatgtatgtttaataaaatcttaaaccaaggagatggcagcgatgactcaaactgattcctacctccttgccctctacgacattagtgggattcaagaatacatatttgctacgaaccgtatgaaagaaaatgtcggtgcctcacgaatcgtcggtgatttaatgagatcacagctgattaaggtattaaaagagcacgaatctatcaaagtagattggcaaaaagacatggaaattgagttgttttcaaacagtgaatttcaggcggaagtcgtttttattgggggcggaaatgccttagttatttaccgcgatcataatctttgtcaaaaagtattcaaggaaatttcgattaaattaattgaaaaaagttatacgttaacattaatagcagaaactcttgaattttcatatgacaaaaccacgtcttattatccactatatcaagaattgcaggataaacttgcacgtaaaaaggaagagatggtacggcctaagccgtttggggcattgccgatttccgcacaagaacattttggcggctttccaattacctataaagacaatcgttctacgattcaagcattaaaagagcaagctacagagtcaatagagttggaagacatcattgacccgcctccgaagaagcgttgggctgtgcagattaatgatttaaaaaagagtcctggggatgatagctacatcgcagtcatccatattgatggcaacggcatgggcgagcaaatgatacgaaaactccaaaacttagacaagaatggcttgtcatttgccgaacaagttaaagggcaccgagagctctctttgcagatttcacaaggctataaggacctggttcagaatgtgatgaaaaccatttcatttgaaaaggacatacttccaattagaccgttaattatggatggcgatgatttgacatttctttgtcaagccgactgggctctgcctttagtagtcgagattctaaagagaatggagtcttattcaggggacttgtctttatcggcatgtgcgggaatcgcgtatgttcatgggcattttccatttgatattgcttatgaaattgccgagaaatgttgcaaagaagcaaaaaagaaacgaagccaaaacggagggcaagggtcatacatcgatttccaattggtgcgtggcagtgacgtcacggctcgggatgtcacgggcagaccgactaatccaaataatgctgtactagggagatatcgtccatatcgagtatccgaacatgagaaaaacggagtcaataccctaatagaatgtattaaacaactaaatgaaaagggaaccgaatcagaaatgcgtattccacgtactaaacaaaagttaatgtatcaagcgtatttaaaaggaacggaggacgctattaaagctgcaaacgaattgctagggtccaggggtattggtgattttaaagaaccgaaaccgtggttggatgcatttgagctagcggattactatgagcaaaacttgtttaaaagcagggtggtgcagcaatgacggtttattaccttaatattacattaaatagcgaactttgtgtggcaaccggtagtagcattgccgggttagttgatacagagactgcccatcagaaaggcttcccgtatattccttctaagcggataaagggtgctcttcatggagtagcgcgggaattggttgattggggattagcagataagctcgcaacgaaacaattgtttggccgagcaggtgctgctgagtccagtccgctgcatgtctacgatggcgttttgtatcaagttcctgatcctagtgatcctgatataaaaaagaaagacgtaggcgaaatcgatgttgatgttttctcccaataccgttcagaatccattttggagatgtttacatcgttacgaacgcatacagcattagaaggacaagtggcaaagagccattcattgcgaacgatccggactgtgaacaaagggattgtctttcgaagtaagattgttttagcggacgaaacgcagctagagttgctaaaacaatgcgtaaaaggactacgacacctcggtatagggcgcacgagagggcttggtgaagtggaatgtgtcttagctgaagcacaaactgtcgaagcaattttgtcgcataagccagccaagccaacgaatgaagtcgtgtttcggttgacactagagcagccactcctcatagctgggcaaagaggcttgtaccatagtagtgaagactggattccaggaagcactatccttggtgccttagcggggatgtatattactgaccatgggttgggagaagaggctcataaggacgaggcattttcccgtattttcttgcaaaacggtgtcaaatttcattatgcctatcctgaacacgatggcaaggtatttgtcccgtgtcctggacattttcagcaaaataaaaagaaccctaccgaaatctatgatgtgtttgccaagagagatcaactcgattcagaagatgtaattctacgctctgttcagtcacttatttatctcgaagattcaacggtttatgtttatgaaccgaaaaaagaaattcgtatgcatcattcaagacctgcagatcggggagttggtagggcattaggaaaagaagacgatcctcaatctggccaattttttcaatatacgtccttaggcgcaaagcaaacgttttacggtacttggcaaggatcgacggacgatttgcaggcgttgatcgcgtgtgttgagaaaaggaatggtcaattgcgtttagggcgctcaagaacagctgaatatggcacggtgacgatggaattcttggaagagccaaagcaggttctcaccgatcagttattgcggaacgaagagtatattgcgatttgtttactgacaccgatgttattaatcgatgattatggaagagcaaatcctgatcccgaccaatttttaaaagaggtagagcaagaattgatgccgcatttaactttaaagcctactcgtaagtttatcaaacaaacgacactttcaggctataacagtaagtggaggatgcctaaaccgcaaattcctgccttggatgcaggtacagttttaattgtgaaaaaccaagaggtcgattgggaaaaagtcgaacaacgattatggggccagcaaacaggtgctgggtatggtcgtgtgaaagtacttagtataaaaaatagtcaaacgtcatcttgtttttcaaaaatagaagtgtccttttctcctgagaagatggaggacaaaggggaatttactaaatgggttctacaacagctaaaacaacgggagcaacaaaagctcgatttagcaaatggaagcaatgtagccaaacgagcaatggaagacaaagatttttctagaaacattggccaaacatccatccatcaaatggctgaattgatgaacatgaaaaacgatgcttctgttatcaagctaattaaggaagtaaagataaaaacaaaacaagtagtaatggaacaaatgtttgaagactgtaaaaatcaatcaagggaatttagagaaggatactttcaaacacttaagtatcaagtcaggggtggtgctcatggccgaaaagaataatagtaacccgatttcgttccgtacctgtgtattgttagagggggagcttgcttctcccttattagctggatccggtgaagaggagtacagcgacaatgacaccgttattgaccaatatgggtgtccttttgtcccaggaagtgcattggcaggagtatttcgtcaccagctgaaagtgcgttttcctgatgaattaccgagcattaaagaattgtttggaaaagacgagagtcagagccgtttatatgtgtatgcaatgacgattacaccaaaagcagaaggagggttttccattcgtgatggcgtcaagctaaatcaatataaaacggcaactgatcaaggaaaatacaatatgcgtgttgttgaaaggggggcaacatggaaacttcgttttgaatggattgagcgagaaaaggatcaaaacaatgcgataaaagaagaattgctttgccagttaattgaaggattaatggatggaacgataacaattggcgctaaaacgaatagaggattcggcaaattagcggttcggcgggtagctgttaagacatttgaccataaaaacagcaaacaagcctcaaagagttggctcgattggaattggaatgatattgacgataagcagtggctacgaaatgaaacatctctaaaaaatggacctcgtacccatttggtaccccaggaggaatcaagtctgcgtgtacctcttcttcttgatcagacgcttatgattcgtacgtatagtaaacttaagcgtgtttcggaagaagaacaattacaagcagagcagcctgattacgaacaactcaatgtcgatcataaggcggttattcctggtactacctgggcaggggcgattcgctcccgaattaaaaatgtgctcgtcacacagttttttatggagaaaggaaaagcagacaatcttttagaagaattatttgggacatggacgaatggaacaagctctacggaaccacttaaagcttcaagagtgcgtattgaggagtcggtagttgaaggcggagagcctttcccgattacacgaaatgccattgatcgttttactggagggacggttgacggtgctttatatacaggagaaccttgggtaaacggaaaatcagaacttattttgcgttggtctaatcaaagcactaatcaaggtagtatttctaatgaagccattggtggaatgttactttgggcaattaaagatttacaagaaggattactcgctgtaggaggagagacgagtgtaggacgtggcatttttatgaaggattccaattacagccttatgattaatggacagaagtttacagatgaaagtacctgtttgagaaaagctgcacaaacagtaaaggagtggaatgcttgaaaccattaaaggtgaactgtcgccgatctaaaatagaacatggaactacgacgaaagacgccttgttcaaatcgattcctgaaaagctccacgatggttttgtctatgccgtatttgaccatgcaatctgtattgggaagagcgaagctggcaccctttctttcaaacaatatacagggaagacaatcgaagaaaatcttgattttttacaggagatacggatttttaatgaagaaagagaatttcgggctgttcgtgttgatggccaatttagatggcgtttacggatggataatgatgagggagaaccaacctattatttagatgaaacccataaattatggggaaaagcggttaatgttcaagaagacgattggacgttacttaaagaagagcggggaactaagctttggtttccggaaaatattaagaaagatggcgagaaaggaattgtcattcgccaatacctcgcctttggtcaaaatagctattgcttttcagatgagcgcttaattggttttgtcgattggtatgaaggaggagatgcacatggggcgaaagattattaaagaggggaatcgctttgtcaatccatataattttgtctcattaggagaggcgtgcgaaaaaagtccatatatttcaccttttgaacaacaagaaaagacaaacaccggatacttcatatgcgagctggtaacaaaaacaccattgtttattccaaatacctcaaataacaaagctctccataaagcagaggagcgaaacaacgatagcctgtcggactcatccagctttgaatttttttcgtataccaatttaaagggccaacctgtgcaaaatcaacccaattatgagcctataattcctgggtccgaaataagaggagctgtacgcagcgtacatgaggcggcttttaatggctgtttatcgcaggttatccccgataaatccctccatcgacggacgatggatacaaagctggcggggattttatctttcgatgagaaggagaaaaaatttaagattcaaccatgtgaacgagtgatgttaaatgtgaaaaaaggtcaccctgagggaaagtatgtcgataaacgtaattatagagagggagaaaaagtttatatcaaaaaatcacctgagccctataaaggaaaacaatacatgccttttgttgtagataacatagaaaaattccgaaaagaggaagattggttagaaggttatattcatattggagaattctttccaaggaaacaccacgaatcggtatttgttcctacgggcgcaacctcttgtacggtagctcctgaacagattaaagcctttttagaattactacagatgtataaagagaatgaacctccacatgagggatataaaaggtatcgagaagagttaggtgagggatcaatcaataaaattcctgtatattataacgaaatcaaagaaaaccaacaaacctatccagcatacctatcaccagcgaatctttcaaacgagatcttccaccaaaaagtagaaaatcttttaaaagaaaatggcggctatcaaccttgtacatgcaggcaaaacgtatgcccaagctgtgcactgtttggatttgtttcaaagaaagctagtcaatccttagcatcaagggttcggtttagtgatgcgaagatagaggaaaagaatggtcaatattttaaggagccagttgtattacctgaacttggagaacctaaaccaggaaccgtagaattttatacaaagcgaaatactgaaacatctggcgaaacaaggttttggacgtatgactataagacgaacgggaaagtacgaatgaaactgaagccaacagatttaacaattagaggaagaaagttttattggcatcataatcctaaaaatacaacaacaaaatacgctcttacaaacatgagacaacgtattcgcccattgaaggaaaaccaagttttctcttttcgagtttactttgaaaatataacagaccaagagctaaaaacgcttcagtgggcgcttgattttaatgacggcaattgtgctcataagattggaagaggtaaaccccttggctacggaagtgtaaaaatacagttgaaaaggctagtaactcgttcagtgagtgggaatggcgaatggttgctaaaccagtatgtgccagatccgaactgtataggtaaatggaaacaccaagatacagaggaacagcgtgataatagagttgtagaaacaacagatcaaagggatgaaattttgcaaattgctaccttttgtcaggaaataaaagacataatttcatatccaaaaggtaaagtggagggtgctgggaaaaattcggaggcatctcatcaatggttcacattaaataaaagaaatgagaagcgaatcctaccaacgattcaagaagaactatttaaaaaagataactctcatttgaaagaactatatgaaataaaaaataaacgctaacaagaagcaaatatgttggtgcgaaccctaagcgcacataaaatccctagatcacccgcaccaaaaaagagctaaaatatgaaataatatgtgtaaaagtgttgaaatgttgttggtttcccatgatatgataaagaaaagcagcggcttttccctattatttattgttttgcttcaaaaaatagggggatttcgctatcgcactccttgtgagtgcgtggattgaaatacaaagtgccgtcgtttcgctaacatcgccgccatcgcactccttgtgagtgcgtggattgaaatcctatggttttacaagaattaggtgtgtcagctgagatcgcactccttgtgagtgcgtggattgaaattacttcctccgtagtcgtgtcgccggcagcccgatcgcactccttgtgagtgcgtggattgaaatcaccctttagcttttaatagtcccatcattgccacatcgcactccttgtgagtgcgtggattgaaatacctttacaatatagtccatgacattcaagacgtcatcgcactccttgtgagtgcgtggattgaaataaaccccatatcagaaaagtgattgagataaatatcgcactccttgtgagtgcgtggattgaaattagaatatcgcgagaaatcgaagttgctaggcacatcgcactccttgtgagtgcgtggattgaaatagcgctggccgtacgagcgtatccaatgccagtatcgcactccttgtgagtgcgtggattgaaataaacagtgtcggatttaaatcttgttggaaattcgatcgcactccttgtgagtgcgtggattgaaatggcgacccaatcgtggagttccgcctcagtgacatcgcactccttgtgagtgcgtggattgaaattttgaaaaacgtagtcaatgcatcctttaaggttaatcgcactccttgtgagtgcgtggattgaaattattaagttttcgcggtacaaggttattcctccttatcgcactccttgtgagtgcgtggattgaaatatcagggtaagtagctgttcttttttcatttttgtcgcactccttgtgagtgcgtggattaaaaatatatttagatttgataaaatgtaagtcctgttttattaaaaaaatgcctgcaactaaacagccattactcaacgatccgacagtaattgtattccagtaaagtctaataaaaagaataaaaaggccttggcacagatgccaaggctacaatttttagaatggtatatcacttttgcctgttagtttaaaggtacattaacttcgctccgcagttgaatcaaaatttgacgaggattaaaatggcaacgatggctgacagttcgtcctaccatttgatcaacggaggcctgtttctgaaagataatctatgttaacaataagggaacatgctataattgaagaacaatagcataacggttactcaagggtggtcggcacactcctccgaaaggaggtgttgctgtatgacagtatttgaagggatttcccttatgttgacgttcggacttctgatcgttgcaatgctgtcgtttcacaaccataaaaaataatccacccttgagttagaggctcaggtggattattcgtaccactggccgatcccccttgtagggaaccaagctattgtttgactggaggtgtaccagcaccttcagtctttttactttactcatttcttatgatcagtataccctttttcttaggaaaagaaaaccccaatataagacgtggcggtttcctgagatgaaacggataaagtgaaaaaatgttgaaatattgttcgtgttccatgatatgatgaggaaaagagtgacttttccctattattatcggaagtacacgaagtcgcactccttgtggttgcggggattgaattggcctactgtaggcattgcattcgagtgcgtagatagattgcccataatcctaccctagagtaaaatgtacaatagacttaaaaaagcaacatgttaattaggaggaaacgatgattggaatattagcaggaatgggaccgaaatcgactggcccatttgtagataagactgtagatcaatgccaaaaaatatatggtgcagtgaatgatatcgattttccacacatgatgatttattcatgcccgacgcctttctatattgacaggccgcttaatcataaggatatggaaatggctataattaatggggctaagaggctcgagaaaacaggtgttgattttatagcaatcccatgtaatacggcgcatgtctattttgaccaggtgaaaaattcactttccattcctttgttaaacatggtcgaggaaacaataaagagagtaccggaacattcaaagaaggtggctcttttagctaccacccctaccgttcaatctggtatattccaagaggccttagccaaagaggggtatgaatttttgcatcaagatgattggcaaacgtgtatcaatcaaatcattgaaaaaattaaacaaggtcagatcggtgagtctctcgaattatgggatgaactctatttacaattagccgatacgattgatacggctattattgcttgtacagatttaaacgttgttacagataaaaaatcaggtgatatttctcttgtggattcatccacttgtctcgcggaagcgattgtacacaaatatttatcattaaaaaactgattttactcttttcgaaataaagaagctcgtgcttgttcttccttcacactaaatcacgcgattaagatagtatgagggaggtcaaaaactcccttgaagtgatgattgaatagctttttctcgatgtctaatcgggagaaggctttttaatgtggcactgaaggcgtacgaggtcatcaaattgtatgatggttgggcattaccgacctttagaatcggcatgcgctaagcggtaaaggcacacgtatgataatacagtcgcagaagcgtctttaaagtgattaaaatcaagtttgtgtcggaaaaggtttttcctaaccaacacgacctcgagcttgctttatatttgcgttgacatcgcatagtaagtattactcacttctcctttttcgaaaacctctccaaaatacgacccaagcaaaaatagctgctaaaaatattagcaatgtccagttaaactccccgacatataaattatgacccactgaaaagataagcagtaaaccgactagaatgacaaaaccgttcaacaattgcatttcaatagagttctttgatttagcgctcataactcaatcctcctatattatgacaatttcactttcatctaggactaccatcatctaatttttcttatttccgtttaattgttttttaaacggatcaagttatagcaactccaagggacaacccaagtagggataaccccttaaaaaaacaccaccagatcttaatgcaacaggaatatctacacccttgcttgacgctataatgagtagacatatgagaggaggagttaaatgaaatctccattgaaagcgcttactgtttcggtgattttattgttggctggtctggttttgggcgatgatcgtatggaggctcatgagttgccgttgtttcattttgaaaaaacgctgattgagccgagtgagatgcggtataatccaacgggggaagttgattttccgacggttattcgggcggctgattattttgagaatcctcttggaacgtattacatgtattatggtccccacgatgctccaggggggattgcgcttgcgtatgcggattcggtaactggaccttggacggaatacgcttcgaacccggtgatctcaagaaactggcagccccactacaatgtttcacatgtggcctctgctcatccgatttggaatgaggaggagggcaagttgtttttgtattttcatggggaaaactcagtgactcgtcttgcttcttctgaagatggcattcattttgattatgaacaggtcgtgattgacacgtctgattttacagggattagcgaggcttcttatgcgcgtgtatttgagcatgagcttgatggaaaggacaatcgctatgtgatgctgttaatgggaaacaataatgggacgcggcggatctatttagcttggtcagctgatgggcgggagtgggaggcgcaacaagaaccgctcatttccccgcagcctgggcaaggagggaatttgtcaggagcttactactttccttacaatggccatcattatgttacggtgcatgggggatcaggaaatcagtatgtggtagatgttggcgagaattttgaccaggaaattcatttagggccttattatcagccgtcagctgttgctcctgaaaacggacgtgcggcgtcgcgctcctatatttattcggaagatgagctatacatggtgtatgaagctgggcaacgtggctccacgaaaattgcccttgctcgggcgattcttggtgatgaacgagtggaaatggcgacagcctctttgcgattgccaagtcgagttgtttcaaccaatagcgaaattgattttgatgttcttgctcgtcgatacgatggaacaacgattgcggaaaatgagctatcgttttccctgttttcaagtgattcgtctgttgtaagggtggacggtcagcgcctttattctggtggagaaggaatcgcagaagtacgagcagaagtgtcttatcaaggaaaagttatcacgactgaagcgatttcgatagaggtgcgcgacggggaggtgtggaatgtcattgatgaacgctttgacgattacacaaggcggtggcagattgccaaagggagcgctgcgcaaggaacgattgagcaaggtgctgggttcgttgacattattgaaaaccgcagaagtggaggcgcttaccattacttgacgtatgaggggttttacttgccaaattcgttttatacattagaggcggagctgtcggtctttgctccgagccagggcaatgaaattagcattagagaaggcaaccgacagaagtctctatttatcacatatgacggtaaccaagggtttattcaagatcggcttttccaacctaccgtcgcggttgagattgacccaacggagcgagcgcgttataaattggtgtccacgggacaaaccacgtacgacgtttatcgaaatgatgaatttttgtttcgttcgacatcggtttcccaagctgggcaaaatttagtgaaggtgggagctgactcacaaggaagtgcggccttgagagtggatgcactgcggattcagacgaatacagcgccataaagaatggagggaccttctattaaatgaaggttcttttctttaaagggggagcagaaatgtacaaagttgtcattgcggaagatgaaaagatgatccgaaaagggctggtgacgattgtcgatcagcttgtcactgattttactgttattggcgaagccgataatggcgagcgggcgctggagttgcttgctcatgattgtcctgatgttttattaacggatattcggatgccaaagtgtgatgggttatcgcttattcgagaagcgcgaagttactatccccatgtaaaaatagtgattgttagcgggcatgaagagttcgcgtatgctcaacaggccatccaacatggggtgagtcgttatttattgaagcccattgaccggaccgaagtggtgcttgcttttgatgagataaaaagaggtctcgttgaacctgaacaagaggatcatgaaaaccatttaattcaacaagtggattcgtatattaaaacgcatattgatcaagatattacccttcaggctgtagcgaagctcgttcatttgcatcctacttatttcagtcaatggtttaaaaatgaaaccggtcaaaatttttcaacctatgtcacgcaaaaacgattggaacgggctgaaacgttgctccatcaaacgaacctccgtgtgtatgaggtagcgagaatgtcgggctatcaaaatgaaaagcactttatgaaactatttaaaaaagaaaaacgctgtacacctacccagtttaggcaaagagccttattgtagcggagtggaggggacttaaggtgtcgttacggccaaagattattttgctgtttttatcgattgttttagtaccgttaaatcttttagggatgatcacatatgcgtacttttcaaaaacgcttgaagaccaaacgtaccattatacggttcaagtgatcggtcaagtgaaccaaaacgtgaatgcctatattgatgagatgcaccgtttgtcgctgttgccgttatatgacagagatattttagcgattcttaaaaaccggtccgatgtccatcattcctattatccccagactgaagagttcgaacgaatgagctcgtttttatcgacgctctcttataatcggcaagagctttctggtattcatatcattacgcgagacggaagtttgtttagtgaccttggctcacctcgaacggtgcatcgtttagccgaagggacgtctgattggcaagaggcgattgaagcagggaatggcgcgtctctgttattgccaacgcactctccatcctatgtgctaggagcagaaaagtctgttttttctgttgggcgtttgcttcgcgatcctgatggctttcgtccccttggcatgattaaagtcgacattgaattaagcttcattgaatcccttctagaggatgtggatttatcggaagatgcctcgattacgatgattgatagaaatggagaaccgatttacgaaacagggaaagcgatttaccccctcttaaaagcgaaaggagaggacgtttggcagctggctgagcgtgagagtatcgcggtagatggggtggattacttgcctgttattcgaaatgattcaagtggagacgtgcaaacgattgtcttcttgcctgagcatcatattgtcggggcgtcacaatcgttgcgcttgtttacaatcgggctgatgctggctgtctctgcagtggtgattatgcttgcccttgtagcggaacgttccttaacaaagccgatttttgagcttcgccaagtcatggcgctagcagaaaaaggcgagtttcatcatcgaatgaatcgaagctcaaaggatgagctggggcaattggcaattgggtttaaccatatgatgaagcaaattaatgaattaattgcgaaagtataccaaacggagattagagaaaaagacgcagaaatcaaagcactccaaacgcaaatgaacccgcactttatttacaatacattggaacatattaatatgatggcgattacaaaacaagcgtacgagctttccgatatggtcgcctcactcgggcgtctgatccgttacagcattgatcaaaaaacacgctttgtcccgctcagagaagagttggctttcgttgagtcgtatatcacaatccaacagaaacgattagaagggaaagtgactttttcgatcgctgttccagaagcgatgcgctccctttccattccaaagcttatcttgcaaccgttaattgaaaatgcaattgaacacgggcaccagcatggggaatggcccggggaaatttccataaaaggctggcaagatgacgcctattcgtacattgaagttcgggacagtggccaagggatgaagcaagaaacaattgaacgaatgaaagaagaacctgaacgtggcgcagggaatcaagttgcccttggaaatatatcagaacgacttctcttgcttttaggggaacaggcacggctcatgattgacagtgaactaggacgagggacaaaggtgaccgtccgattgccgaaaacctgagaaaaggataccaaatcgaaaacgaacaccctcttaaactgtaagcgctttatttaaactgaaggtagaacaaaaaggggggaatgtaaagtgaagagatggagcataagtgcgggcctgttgctcgttgtggcaggttgttcatcgtctggtggatcaacggatgcaaatggagacgaacaaattgagttgacgttttcaacttggggcaatgaaaaccacattgccgtttatgaagaattattagaagcgtattacgtcgatcatccaaatgtacatgtaacgatccagacgacgccttttcctgactatcagcaaaacatgaccgtgcttgcagcggggcaagagctgccggatatcggatgggcggctgagcgaatggtgcctcaatttattgaaaacaacatactcgctgatttatctgcacttcgtgaagatgagtcgtttcactttgaggacattttgccagggacaattacgcaatatgaagtgggagacgccctttacggcgtgccgttctcaagcccgccacatattattttctacaataaaaccttatttgaaaaaaatggactagaaacgccacaagaattggaaagccgaggcgagtggacgtgggaagcttttgaagaagccgcagctgtaatcgctgaggaggaaggcgtctatggggcgaatttctttagagcttgggaaacatgggaaaatcttttagcacatacgcgagctgaagggggagacctctttaacgaagacacgactgagtttacttggaatagcgatgccggaatctcgacgttagaaatgcttgaacggatgatgtttgaggaccgctcacatcctcgtgcaggggaccaagtcgcatttgaagctgggaacgtcggaatgttttttgatgtttatagctatgtttcaaccgctcgggggatcgaagattttgaatgggatatcgctcctgttcctcttggctcgcaagggaggtcgcctattctcggccaagcaggctatgtcatgtttgaagggacggaacaccctgaagaagcacttgatctaattcgctactttgcgagcgaaacagggatggaagcgacttccacgtacttcgcgccaccacgggcatcagtacttgaatcagatgcttttattgaacaaccaggcaatccgccgagagcgagcatggagtcaacgattttaaacttaagcgaagaatcacgtgtgttaccgattcatccagaatggcaaaacatcgacaaccacatcctccaaggctttgatcatttattcggccaaacggcagaaccagctgacattcttgagcaaatggaagcaagcatcaatccattggtgcaagaatgagcggcggggtggataagacatgaatgcagatgttcaggcagaatggagacaaaaaaagaaaaggcctcgaaaaccgatatttaaacgagatgagctagcaggttggctttttataagcccgatgttactcggatttacgatctttatgtttgttcccattggcttcgctttctatatgagcttcaccgactggcccttactcggccagtcggaatttatcggaacggccaattatcaagcgatcgtgcaagaccctgaatttcaacaagtgatgaaaaatacagttctgtttaccgcaggcttagtaccattcaatattattctcgccctagggctagccttgcttttacgacatccattaccaggaatgggcctattccgcacgattgtttttgtgccagtggtcacaacgcttgtcgtctgggcgattgtctggcgctatatgtttgcgactgactttggtttcattaactcgattcttgcttggtttggcattgaaccacaagcctggttgtataacaaaaatttagcgatgcccgttgtgattttaactagtgtcttgaaaaacgtcgggctaaatatggtgctgtttttagccgccttgcaaatggtgccgaaaaacttatacgaagcggcgcgaattgatggtgctggaagctggcgtcaattcaaaaacatcacgctcccaatcatttcacctaccgtctttttagcgacgattattacgattattggagcgatgaagatctttgcgcaaatctttgtgatgacaaaaggtggtccagagagcagcacaaaagtgattgtctattatatttgggaaaaagcatttcgattatttgatatgggttacgcttctgcggcagcgtttattttattctttgtcatttttgcattcacattgattcagtggtggcttcgaaaaaggtgggtctacaatgaagattaactccgtttctacagtcgtccgttatggtttattaacgatcatttcagcgattatgctgttgccgtttatttggatggtcacgacgtctttaaaagaccctaaccaaattttcgcgttgccgccaacctttatcccaaaccccattcagtgggatagctatatcaatgttcttagtagcacccattttcttaggcaaatgttcaacagtatttacattggcgccgcggtgacaatcggaacggtattacttgcttcacttgcggggtatgcgtttgcgcggattccatttaaagggcgaaatgtcgtttttctcgcgttcctaagtgtgatgatgattcctggcgaagtaacgatcatcccgctctttctttttatgcgggaactcggctggattgatactcatttgcctttaatgatcatcccgatctttggcgcaggcggagcgtttggcatctttgtaatgaggcagttttttaagcaagtcccagcagaacttgaagatgccgcccgaatcgacggctgctcccgtttccgcatctttgtgcaaataatgttgccgctatcaaagccagcgcttgcgacggtgacgatctttacctttttaacgaattggaatgagtttctcgaacctttaattttcatcaattcaagagaattaatgacgttgccgctagctctgtctctctttaccgacgaggctggaaccgattggagttcactgatgagcgcgtctgtcctagcaacattgcctgttctaatagtcttcttctttgcgcagaagcagtttattgagagcctagcaatgtctggatcaaaggaataaaacgcataagttggaggaataaacagatgagacaagtaacggaaatagaaaaacaagtacgtgtacgcgcggaagccgatgtggtcgtttgtggagggggaccagcagggattggcgctgccttaagcgccgcccgaaacggcgccaaaacgattctcctcgaatcacacggctttctcggcgggatggggacagctgggatggtgacttcttttgcctacggttatcatgataaggagcgctttattaccgggggcatctttcaagagattcgccaaaagctccatgacagaggcgggctgatcatgaccgatcgcaaaggctgggagccgtttaatgccgaacaatacaagattctcgcgtttgaattattggcagaagcaggtgtcgagctcctttgccacacaaccgttgtcaatacgatcacaaaagaaggcacgattgaagcgatcattattgaaagcaaagcaggcagagaagctttgcttgcgacgcacgtcattgatgcgacgggagatggagatgtcgccgaacgagccggtgcgatctgcaaaatcggcagagacaaagacggaggcacgcagccttcctcacttatgtatgtacttggcaacgtcgatacagcagcacttggcgaaatgctcgaccaagaagggcggcgtggctattggaaaacagaagacgggtataggtacgtaaacgcaaccggtttcgcagatgaaatcgaacaggcgaagcgcgacggtttcttaacaaaagtgaaccgagaccatatcgcagcgatcttcacagtcccgtggatagacaatgttgtgggcattaacttcggacgaatacaaggcaaaaacgccctcgacccacaagacttaacggatgcggaagtgatcgggcgagaacaagtgctagatggaatcgcttttctgaaagaatacgtaccagggttcaagcgagcagagctccttcaaacagccccacaagtcggaattcgggaaacaagacggatcatcggcgactacgtcatcacacaagaagacattgtcgaattaaagcaattcgacgactgcattgcccaatcctgttacatgattgacattcactcgccagactcgtcaacgacggaaatttacaaactgccaaaaggcacccattacgacatcccgtaccgcgccctcctgccacaagggctaaataacttgctcgtcgctggccgctgcatctcagcgacgcacgaagcattaggctccttccgcgtccaagccatttgcctcgcaatcggagaagccgccggagctgccgctgccatcgccacaaaagaaaagtgcctcccacgagaaattgatgtgaagcacttgcaagacacgctggtgaaccaaggggcgatattaagctgacattttcgaataaaaggatttgcaatggtgcttgaagatggactacctataaaaatgagacgaacaagaaactccaaacattgggttatggagtttcttgttttaggtgttcgtggtattaaaatggggtgggattagaaggataggtgggagcaacggtttaattgggtcaacctaaagaagtttgccattgaacattaacgccgtcgaagacaaaagcttaaatcagacggtgcgaaccccaagcgcacataaaattactagatcacccgcaccaaaatagagcgcgaatatgagcttatgtgtataaagatgtgaaaatatggttcatgttccttgatataatgaagggaaagcgcgactttcctgtattatctgtggttttatttccagcaaataggggaatttcgctgtcgcactctatgtgagtgcgtggattgaaatcctacaagggcaacaatagtttcactatgataatgtcgcactcttagtgagtgcgtggattgaaatctactttggtcatttataatccctacctgccaagggtcgcactcttagtgagtgcgtggattgaaataaaaggattcctccattctctgcataaaatcttcgtcgcactcttagtgagtgcgtggattgaaatgtcgagattatataggtatcgtccaattccaaattgtcgcactcttagtgagtgcgtggattgaaatgatgacacgggcctgaatttcgattggccgagaagtcgcactcttagtgagtgcgtggattgaaatacttttgttgcgttgcgctctttgattacttcggtcgcactcttagtgagtgcgtggattgaaatagttacagcaacttatagcttcactcggtccaatgtcgcactctatgtgagtgcgtggattgaaatcaaacgtgcatcttcttgagttttcaaattgctacgtcgcactctatatgagtgcttggattgaaatttgcttccggcgaacggaatgtggctttctgctcggcgcactttttataactgcgccaattaacatcgacatgaatcgacgttcgcttgcgataacgactagtcatgcaaaaagcaagtccgaaaaaccaaataagcaatataggcgcaccgacgcccatattgcttattttcgtttttattgtctatttcaacgctggccaaaatgctttattcgcttcgattaagtcatctagtatatcttttgctacttttgcacttggcacggttttcgataatgtgatggcttgccatagtttttggtaggaaccttcttcaaacgcttctactactaatttttcgacgccaacttgttgctccatgagactcttttggaatctagggatttctccgacaactagtttttctgggccgttgctgccgacgatgcacgggatttctaccattgctgttgggtcaaagttcgggatggcgccattgttttcgacaatcattaacatccgttcttttgtgttaaaggcgatggcttttgctaaatcaacgatgtaggaagcgtgctcgtcaatgactagctttgtttcttttgccgtgcctttgtcgataatagcttgacattcaccgaaaacaaatttttcgcgaccctccatgacttcgttggcccgtgtgtattctttatttgaatgcgccacttcgtagtctgggtataagtaatattttagatatgtgtttggcaccgtttttggatcgagtgcttgtacctctcttgctttttttagtgtgctattccagctttcttgctgttcgagttcggatgttccgtctgtcgcataaccatgttggctcacatgttttatcacgtcaggcattaagctgtttccgtttttatctcgaatatctgtccaccagccaaagtgattcaagccataatagtcgacttccatttctttgcgtgaggcgaatcctaagtttttggcgattagttcttcaatgccaatcggcatatcacaaatgttcaacactttagaatggggtcttagtttacgtgttgcttctgcgacaatggctgctgggtttgagtagttcagcatccaggcttcgggtgaatatttttccatataatcgattagttccaatacgcctggaatcgaacgcatcccataagcgattccgccaggcccgcatgtttcttgtcctactaccccgtgttttaatggaattttctcatccaattcacgcattgcatatttaccgacacggatatgggccataacaaaatctacatttgtaaaggcttcttctggatttgtgcttgctagtaaacgcacttgtggggcacgttcttttaacaagatcgcacacgcatcggcgatcgtcttttgtctatctccatcattatcataaagtttaatcgtatcgatggggaactcatctaaatagtccagtagcatcaaaatgatccctggtgtaaatgtacttccgcctccagcgatggtaatgttaaatgttttcatagtaaatctctccttctcctattatctgtttaaagttttgtttcaaaggaatctcttacttgcggtacacttaagccaacaataatttgtatgctttggccgcttttagccactccatgggccattttattgtttgtgaagtaatcgctgtctttgaccaagctagggtcaatcactgtaactcgcagacgcgttgcgcagtttgtcacatctttaatgttttctttgccgccaaggccttctaagtaatagaccgctttctcttcatactcagactcgtaagctgccgcagcttccttttcatgattactcccttttttagccttctgataatcttgttttgtgtatagcctagcctcctcttccttttttcgccctggtaatggaatatcaaatttaacaatcatccatctgaacaggacaaagtacagtgctgcaaatataagcccaatcatggcttggacgatataaatgcttccgtgattagaagcgagtggtatccagtttaacgcgactatttcaattaatccgccgcccatcatgccgacgacgccaaacatgttcatcagcgttaccatagtcgcgccaagaagggcatggatcacaaataaatagggcgcgataaatagaaatgtaaattcaagcggctctgtaattcccgcaaatatcgctgttaatgttgcaggcaatacgagcgcaagcactttttttcggttttcttttggtgttgaataatacatggcgagggcgatccctaaacagccgaacatcttaatatttccatgcagtaaaaacccatatggataaagatcttttaacgctgaagttgaagtagcaaaatcatttaaattggcaatccaatatggttttaacccttcatttacagcagccggaccaaattcaaaaggagtgtaaataaaatgatgcagccccgtcggtattaaaaccctttccaagaaatgaaacagccagacaccaacataaccagcttgtgagatgaacccttggagggaaccaatgccttgctggacatacggccatacaaaagcaacgaggaaagcgaaaggaatcattacaaaaaaaccaatgatcaccacaaagacgagaccctggaaaatgccaagcatttcaggaagcttttgatcataaaaacgattatggatccaaattacaatcgcagatatgacaatggcgccaatgatatttgtatccaatgtagggataccggcaatttctttaacacctgttatgttctcgcccccttgtgatagatcgacgccgaaagtggacggccaaagtgtcaaaatcgcattaataaaattattgaaaacaaggtaaaccatcaatgctgcaagtgtggcccgtgcttgcgctttttttgccaatgaaatgggcaagccgataacaaacgccagctccatatgattaaaaatggtccagcctccactttcaatcagtgaccaaaccttgtaccacatcgtcccttctgcagcgatgtctcccataatcgccgggtttttaaataaagttgccaggccgacgacaatgccaaaaaatgcgaataagagaacagggacaatcatcgcgctgccaaaccgcttgattgcgttcataagcaaaactcctttgcgtggtctacaatttaactgtaaaggcagcgctttcaaaacccaataggtttgacgcatttagaaatcaagttgtacgattagattatattttcacagaaggaaaatattttcatagaaggtgagcacatgattctggacaagttagtcaataaacactttgaatcactaagcgagaatgatttgcatattattaagacgatttatgaccatattgatgagatgaagacgatgaaaattcaggatctcgctgtttatgcccacacttccatctcttccatccaccgactcacgaaaaaaattggtttagacggctacagcgacttaaaatcttatattaaattgaacaattttacggaaggtacgagccaagatttaatggaactgcttgaccaagatatccaccagacgaggaagtacatggagcaactagacttttgccaattaaaccgactgattgaccgcgctccatatatctatatttacggaacgggggctgcacagctggatttggcgaatgatgttcagcggcagttatggacgctgcacaagaaatctcaagtcatacgaagtgaacgggactttacaaatggactcggagaaatgggcgaaaacgatcttttgtttattatttctttatccggcgaatcggaaaacctcgatgaaattattcacgcgattaaaacaagaaagattaaatgtgtcagcctaacaacattgaggaataatttactggcacaaaatgcgatgtttaatatttatgtaaacagtactcctttctggttgtataacaaagtcgagaactctagctttttgccgttttacattgtggttgatattatcgtgaggaaatttagtgagtggaaaatggaacagttgaaaaataacatgacttaacaaagcaatgacttggagtactccaagtcatgtgagaagtagtacacttgccaagaataattttttactaattcatggttattatagacttcatacctacaagtagggggaggtacatatggaaaaaccgaagaatggccattctaaaatagaaaatttactcgtatttctatccgctgttttctttatctatcaccttacatttctaataaatgcttggccagatattcctaatcaaatcgcctttcactatagtaatggaatccctgacaatttcagacctaagtatttgttaattgttattccactaataggtgtattgatgtggtgtctgctcggttttttagttaggaaaccagaaaaactgaattatattaatttgactgaagcaaataaagatcttcagtacatgaaggctagaaaaatcatgtccgtcgtacaaaatgcaagctttatcatgctcttatttgccaatgaagctttcataagaggagcaatgggacttgaatttagtttccaactctctatttctttactgctattagtaatttgcaatctgactcctttgtatttcttaatatgggccttcagattaaaatattgacagaaagtagatggacgtactgaaagttctggacgacgaacgtgttctttcaaaatagggctgtgcttaaaggtcatggaaacgtaacttttgtttatcttaaaaggcataaaaaaatcgcctaaccttgtataatgtagtcaccaattagtatgatgagagctgtttaaacaaaatcagaaaggcacaagataaatgaaagcaatatcttatcgaaaatcggtggcatggggcaaagcgcttggcagtttactgtttgtgctggtttgtttgtttctgctgtatgttgctttttttaccgatgctacgttaattcatacgtttttttgtatcacgtcagctatcatagggattccgttttttggtggatatttggttgtctgcttgccacgggcattgaaatcaaatacgcagttactcacttatgaccaacaggctatttcagacggtaagcaaacagtagcgtgggtggacattgtaaaaatcagctacagtggcccttccattcagagatggctgcttccgcagtttcctaagctgatttttcatttgaagaacagagaaacctggactgtgaatacctattatttgctaactgataccgaaatccaatcagtcatgaagctcctgcacgggctaattggccgcaacggtaaggaaataaagtagtttcagtagatttatatttttattagctgaggatgtctacgattaacggaaaggaaggcgtacaaacaatggaagcgagcatcgaaggcctccttcgtctattgagagaccagcacgaggcgcatcatggtattccagagagtgagatcgaggcaaaggaacgagagcttggcttttccttgccgctggtgctacggaattactacaaagcgttgggacggtctccacatatctcccaaggatgcaacaatcaatatgaaccgctgccgttggagaagctgtttattcctgatagcactttttttacaacagacaaagcatttttggttttctaccaagtagaagaatctgtgatctactgtgggatccggttggacgagttggaaaaggaagacccgccagtttatttatgcgcttggagcttcgccgactggcagttagagaatcagtcactaagccgttttctcgctggcaaagctctagttcaattgggcgttgaagatcggctgccgtattgggcgattttcgatgaaagcacggggaacttgtccgactatcacgagtggatgcgtttagacgaccacgaagatgagatagaagaaggttccgagctaaatacgtggaaaatatttgtgaaagatgatgtgctgatcgtgtttgaactttctggttcagaagaagaggaggctccgctggcggtatatcttgcttcttttaagcgaacgaatttggagaatctactaaacgagctggaaaaggcagcgaacctgcccgcgtatcgaaccaatctgtttgaacagtaatggtgtggggacccatgaaggaggcatcctgtgatcgaagcattgaatcaatcagtctcgatttcatcacttatctggctatttttggtattttttatgattcatgattttgaggaaattatttttgtcgaaggatgggtaaaaaaacgctacgagtcggtctatcaaaggatcccctctttttatagaccaatctttcgtatatttaacggaatgactggttcgcaatttgcttttgccgtgtttattgagtttattgtatttattcctgttacctatttagcggcagagcaacaaatgtttacctggttcattggttttaacgtcatcgcgtttttgcatgtatttacgcatgcaggtcaagcactgctactgagaatgtatacaccaggggtcattaccgccattatcgtgacccttccatattcactatatttgttttaccggttagaagcggaatataatattcaggttaatgatctaattgccagtatcccatacggactgaccattattccaatcgtggctttcggtcatctactagctaaaaaagtgattcggtaaaaaatgataaggtatttcgtggatcgtttttggatttaacattgataacaagtgagcaaacaaatataactttgagaaatgctttctaacctattattttggtgcgaaccctaagcgaacataaaattcctggatcacccgcaccaaaaaagagcctaaatatgaaataatatgtgtaataatgtataaatctcgtttacgtcctatgatatgatagaagaaaagggtgatttttccctattatttatagtttcactccaagaaatagggagatttcgctgtcgcactctttgtgagtgcgtggattgaaatacacacagcccattgtctcttcgtttcacagcttcgtcgcactctttgtgagtgcgtggattgaaataatcacctaatttctgttgccttataatctcttggtcgcactctttgtgagtgcgtggattgaaataaccatgtgtttgtaatcggcagaactaataccggtcgcactctttgtgagtgcgtggattgaaatcgtccggggcatataaattgaattcttggactagggtcgcactcttcgtgagtgcgtggattgaaatttgcatttcccgtaaacgggcaaaaaaaggcggcgtcgcactctttgtgagtgcgtggattgaaatccatagtctttggatagggcatcgatagggttagccggagaactctatgtttatgccatttccattaggccacacggcagttttcttttgtgggttgtgaaaatagtgtccacgtaaaacgagagccaggagttttcctcctggctctgtctgcttttttcaagaattgctttgctaaaatgcatgactaaacagctgaaccaatccgttcgatgtggattttttgctgatactgttcggcttgtgaaaaatcaatcgttggcagccagtggaggcagtttgccaatgagagggcgctgcctgctaatagagctgcttttacatcgtttgtttttcgccactcgcgtataaaggtgccgagaaaaatatcgcctgaggcggtagcatttgttacgttaatcgttgggagcgtgacacgccagatgtctccgttgattttggcgactgttccttcgccgcctaatgtgacgatgcagttagggtaagggctgttttttaaatattcttcgatttgctgctgtctgttggcggcttcctcttttacccccattaagtctaaaaattcttctccgttgatctttattagccatggttttgcctctgctccgtatgctaatgcatcgccgctgctatcgagaatggtctggacgccgcggctttctgcttgggcaatgatgtcccggtaaaaagtgaggggggtcccctttgggagtgatcctgaaagcacgagatggtcgcctgcttttagggagcaaaaaagcgattgcaaaaactgctgttgttctttttctgtaatggaaggtccttgttcattgattagggctgcttcttgctttgattcgtttacgagaatggtgcagtatcggttatcgccttcaatgaatgttgtttcccctgctagttgggcgtttttcatcatctgtgctaattgttctcctacaggcccgccgaaaaatgtgtgcatgtgaatcgttttttgctcatttgtgacaataaaaggaagggcgacattgaatcctttcccgccaaggccttcatgggaggcactagaacgggttacgccatttggataaaaagcttgaacgtaaatggttcggtcaagggctggattggcacataaaatatggatcattgattacacacctctatttgcattggtttgcattttgagttaatcatataataaaaaccaagtattgcaaagtcgttaatgaattaatgcaaaataaagcaaaaataatatttgctttttttggctttgtcacttataatccaaggtaagcgatttcagtaataagggagggggatggttctttgcttccgcaggaaagacaagatttgatcatgaaggaattgtatgaataccattctgtcaaaatttccgaacttagttccaaactagatgtaacgcgagaaacgattcgcaaagatttatacgaattagaagaaaaagggctcattcgcaaagtgcacggaggagcggtgttaaacaaggcaaatcttgagacgaactatagctcgagaaaaattgtcaatgagtgggaaaagcgggcgattgcgaaaaaagcagttgagtttgtctttgataacgatacgatttatatcgactatggcacgaccgccctttattttgctcgcgagcttattatgaaaaaaacggggctgacgattgtaaccaattcgctttctttggccaatgagcttgtggagcactcgaatttctcaattattatcattggcggcaacgtccgaaaaaatgagcgttccttgtatgggccagttgcgaaccaaacaattgccaatttgtatgtcgataccggcttttttggcattggggctttgcatccggaagtaggctatacgaacatccatatgggggaagctgaagtatcgcgccttatggtgcaacattcgaaaaggcgcgtgatgatggctgactactcaaaattcggctccatccatatgaataaagtcgctccaattgaagaagttgacacactcattaccgattccaaggccgatgcagagatgctgaaagcgattcaagcgaaagcacgaaatgtcatcgtcgttgaagctgaagggggtgagggagatgagtaatgctttacttgatcgagacttgattttgttaaaccaaacatgccaaacggttgaagaggtgttagagacaatagcggcgccgatgcaagctaaacagtttgcgaaagagacgtacgctgacggtttaaaagagcgagaacaatcgtttgcgacagggataccaactgagccgtttggtgtggcgattcctcataccgatgccagttatgtactggaaagcaaaattggattgttgacgctaaaggagcctgtctcgtttggcgtaatggggtcggaaaacgatcaaatcgatgtgaaagttgtgttgttgcttggcttagctgatggttcagctcatttgaaagcgctgcaaaccattgtggaacgtattcaagatgcccattttgtgaagaagttggcttctgtacaagaaaaagacgaggcgttagccctattggacgcttccattactaaacaactcgagggggaataaacatgaaaaaagtattagtcgcatgtggtggagctgttgctacgtctacggtagctgcaaataaagtgaaagcgattttgaaagaaaacaacatccaagcagacgtcagccaatgtcgtgtcagcgaactcggttcaaaagcgcaaggcgctgatttgatcatctccacggcaaaagtcgatcgtgattatggcgttcctgtgatccatgggttgccttttatttcaggtgttggccttgataaaacgaaacaagagattttggatattttaaaataacctattgctgatagggggagacatcatgaatgtgctgcaatatatattggatttagggcctgctgtcatgcttccggctgtgatctttgtccttggcctcttgttgcgccaaggaattgggaaatcgttaagatcagggatcacgattggggtcggatttgtaggcatcactttagttattagcttactgacagataacttagggccagccgcacaggaaatggcggaacggtttaatcttggtttatcaattgtcgatgttggttggccaggagcttctccgatggcgtgggcttctaatataggaacggtggccattcctgttgccattcttgtcaatgtcgtcatgttgttgttgaaatggacccgtgttgttaacgttgacatttggaatatttggcatatggcatttgccggtgcgattgtgtccaccgcatcaggaagcttttggcttggcgttcttggtgttgtcatctatgcggcatttgcttataagctaggggattggtttgcgccgatcattcataaatacaacggcttggaaggaatttcgattccacatggcacaggggcgataatggcgccaatcgctgttgtcactgacgcaattatagagaaaattcctggtttgaaaaacgtgaatattaactcagataaaattgaaaaccgacttggaccaatcggagaacctgcgattattggtgccattctcgggacagtcatcggtgccttggcaggttacgaggtatcagcgattttgcaattgggcattcaaatggcggcggtaatgctgttaatgcctactgtcgtcaagtttattatggaaggattaatgccaattgccgaggctgcaagggaaatgctcgataaacgattctcagggcaagactattatattgggctagatcctgcgctcttgctcggcaattcacaagtggtcgcggcaagcttgatttttgtcccacttacacttgtaattgcaattcttattcctggaaacgaagttcttccgttcggtgacttagcgacaattggcttcttcatctcgattgcagtcggcatccacggcggaaacttgtttagaacgttgatctcagggacgctcattatgacaatgacgatttggattgcgaacatgatggtcggcgtccacactcagcttgcactcaacactggaacgatatccggggggcaagtagcatcccttgaccaaggcggcagcccgcttcaattcatcatgaccgaactaacaacatggcaaaatctacttccgcttattgtcgtgacggcgatttatggattctgtgtcgtatttacgattgttcagcataaacggggcaaattactcccagcagagacagataaaaattaattgagtcaggagtggagatcatgaaagcgctcgttcttgaagcgaatcaatcatttactataaaggacattgaaacccctgtccctaaagaggatgaggcattaatcaaggttgcttattgcggcatttgcggctctgatttggcacggtacttcgatggcaaagtccacaattacccgattgttctcggacatgaattttctggaacggtagaggctgtcggcgcaagcgtcgattcagtaacggttggtgaccgtgtagtcgtcgccccccttttgccaaataaagacgatccctttatgcaaaagggaagcccagctttaagtagctcatacagttttcttggttcccgggaaaatggcgcaatggccgaatacgtagtcgtaaaagcggaaaatctcctcgttttgccggaaacggtaacattagcggaggcggcgttaatcgaaccattgacagtcgcgatccacggaattgagcgaattgtgctaccggcaggcgaacacgtctgtgttctaggagccggaacgattggcattatgaccattctcgccttaaaagcacgcggggcagggaaagtaacagcgattgatatcaacgacgagaaactggcatttgccaaaaaaatcggcgcagacgacacgattaactctttaaaagaggacccggtttcatacgctagcaaacatggcaagcctggcgctgttatcgaaacagcaggcgtgccgagcgcccaagagcaagcggtcgctttagttgagaaaaaagggaagattgtgtttgttggaacggcgtcaggggatgtgacgtttccagcagcgacgtttgagaaaattttacgtgaagaattggaaatcacaggttcttggatgagctattctggcccattccccggctatgaatggcaggctgcgattgattacatcgcgtctggcaaaatcgatgtcaagcctttgatccatgacgtgtttaagctagaagatggcgacaagccatttcaagcaatgaaagacccagacaatcattcaattaaactactatatcaaatcgcagaaaacgaagggcaggtgggcaaataaatgggattacagtcaacgacaccgatgctaaaaaaagcaaaagccaacaaacacgggattgtcgcgtttaatgtccattcatttgacagcattttctgggtgctcgaagcagcagcggaattgaagtccccggtaatcctgcaaacgacagtcgggacggtcaagtcactcggtgcaaaaaacattgctgaagtagccaaggccgcagcggaacattaccaagtgccaacaggcttgcacttagatcactgcacagactttgaggtgatcaaagacgcgatccgcgctggctatacatccgtgatgatggacgcttccatgcatccattcgcagaaaacgtcgctcggacaaaagaggtcgtcgcgcttgcctcgtcccttggcgtcaacgtggaagcagagctcggcaaagtcggcggcgtggaagacgacattgtcgtagacgaagccgacgcccaaaaagcaattccagaagagtgccgccaatttgtcgaagaaacagacgtgccgacacttgcccctgcgattggcactgcccatggaatttacaaaggcaaacccgaaattgactttgagcgaatcgccaaaattgccgaaatggtcgacgtccccctcgtccttcacggcggctcggccgtgccagaagaagacgtgcgccgttgtgtcgccctcggaatggcaaaagtcaacgtatcaacagaactaaaaaatgcctattccgaagcaattcgcgaccacttcgcaaacgaaccagacagcctcgatccacgcgcgtatttgcaaaaagcaaaagaagcagcgaaagaaatggcgaaatcaaaaattcgcatggttggcagtgaaaacacggttgtgccagcgtttgcgtgaaaagtgtgagcccggactgtcaccttcgcttgttaggctatgtactaacaagcggaggtgttttttcattaattggggaggaagggagaagaactcaatcgaataggtgtataagcaaggaacctccttacgcaaatagaagctttttaatggaaagagtaaagtagagatagacacaattgagccaaggagattaactttacaattattcatcttttgagccgtgattcttagtgcgaaccccaagcgcacataaaatccctagatcacccgcaccaaaaaaggactttaatgtgggataatatgtggaaaagtggcaaaatgttgttggtgtcccatggtattatatagaagaagagcggcttttctctattatttattaatgggtttccaataaataggggaatatcgctgtcgcactcttagtgagtgcgtggattgaaatccatcttacaattaccgcgtttcttttgttggacggtcgcactcttagtgagtgcgtggattgaaattaccagtattcaaacatagtgccatcacgaacaattgtcgcactcttagtgagtgcgtggattgaaattcgaacagttgttacatcaaaacggtgtggagcgtcgcactcttagtgagtgcgtggattgaaattcgcgttgctcttgtctacaatttgccgcctcatgtcgcactcttagtgagtgcgtggattgaaattttaccccatacgacaacgctagtgaagcttggaattggttactgtccagttccctaatttagggctccattagaattaggggaaaaagtaatgcagaaattaataaaggaacgaaaacaagaaaaagtttatagtttaaaaaataaaaaacgcacttcttgaaaagtgcgtctaaaaaacaaagatatttatttttcctcaagggttgtaaaaaaaattttctcttagattaatgaacggtatctcctttatctcgagtttcaattgtcggagaatcacgatcaatgacgacatttgtttggagggtaaaagaaacacacaataatgctgcaaatagggaaaaccatatttttttcaaggttgatcgactcctatgtttgatagattttggcgtgcacgataggcgacgtttaaatacttccacgctagttcttgttctcctttttgtttaaaaaacgttgctgcttcctctgcgatctcctcaatttcaaagttcatatccgactcactcaggcttttaatggcttggtcaatttcctccggattagagtttacgtatagtccgtaagtagcaatacatctagcttgatattcgtggttgttgtaagattgtgctcctgcataggctttggttaaatgagggagtgcctcattgaataagccgatgcgaaacaatgcgtttgctaaattatactcgcttttgactcctaagatagtctccgtgcattcaggataggaaaggctcttttcgaaatactccttagccttttggtaggctttttttcgcaaagcgtctaatcctatgatacgtaaaactgctacttgggccatggggtaattattcgaaatgctaagagcctcttctaataactttcggactttctcatgctgtcccgcttcagaataaatacctccaagtatcacttggcagtatacagcccgttcgatatacccgaggcgattaaaagcaagtaatgcttcttcaatgtatgaagcagcgtacggatactgattgattctatataaagacgaacccatgtagtaatagaactctgcttcttcggcttcatcgtttatatactcaagcaaacgttctgctttacggaataaacgaatcgcagactggtaacgttcttttataaattcattttgaccacttacaaataaatagaggtatttgagcgtatgatctatcgaatcttcgatcatattgcccgcctgttgtatcctttcatcatccttttcgtccttgcctccctgtttggccatgattgaatgcctgaactcaactaaagaataataagcgattactcgatcatttggctccattgttttgaccatattttctgctttttctttgagttcatttgcttgctctacagaacgtgcaataatacagctataccactcagcaattatcgtgcttacttcctctggagataaaatagcagacataaagttctcccctccttaaataaagatttcatagaattttttacaattatactagaaaatagagaaacatgtaatagatttaaaaatttcccaatatacaaatggctaatttgtgtaggaaaatgttaaaaataaccttgctttataataaggcgtatggacttatcaaagtggaaaaggtcaagtgcgtgtggacaacaaaaataacataactgggtacttcagtaacggtggttagttgtggggagggatatataaacaatgaaacgttcatcaaagataattttaagtgttgttgcgggcattgtggttatcacgttaacaatttcattttatgccggaaatacgctcggctaaggttaatatcaaacatactttcgcttcttcccaatcgactaaaataccgtcctttaaataggagtggtattttattttgagaattttcgttaaaacattgactataccatgtggttcaaaccgtccctgttcgtgaagacgcaaccatcaccgatctgttagcaaaatagcaatcagacgaactatgagcatacaagaagtatattctaatgcaataataaaaacatgataatcaacaataatttattgataatcgataaatttgtgatagaatcaattgaacaacaaattaatagaggtgtttttcatgaaacgaggttctacgctttttttaaagatagcggtggtgcttatgggaagtcccgttcttgctttgtgtatctttgggttggcttggatacccaatcatccggtagatccagattatggccatatcctatatcctatttttatcggtgtatttttaacagtgataccgttttttgtcgcattgtctcaggcttttaaacttttaagttacattgacaagaaccaatcgttctcggaactgtctacgagagcgttgaaaaagattaaatattgcgcaatcatcatcagtggtttgtacgtagctattatgccgttcttttacttgttagcagatcgagatgatgcccctggtctcctatttatgggagtcgtccctctcttcgcttcaacggtaatcgcagtattcgctgctgttcttcaaagacttttccaagaagcgattgatatcaaatctgaaaatgatttaacggtttgaggtgaaaatcatggcgattataatcaatgttgacgtgatgctagcaaaaaggaaaatgagcgttactgaactttccgaacgagttgggataacgatggcgaatctctctatattgaaaaatggaaaggccaaagcgattcgactctccacgttagatgcgatttgcaaagccttagattgtcaacctggagatcttttagagtaccgaagtgatgaaaacctccatgatgaatgaaagtggacggcagagaagacttagtcagaatggaggcatgaatgatgaggccattaaaacaactcgttcgttttgggtgggagcaagctttgtcctgcttgtttcctgtcgttatatttgcttctttggccattacacagctcgtgccacttccctttttgccacggtatgattggctgctcattatttgtctttttatgcagtggtggatggtgcgttctgggcttgaaacttgggacgaattgaaagtcattacattgtttcaccttattgggctggctcttgaactttttaaagtacacatgggctcctggtcctacccagaggaagggtattccaaggtatttggcgtccctttgtatagcggatttatgtatgcaagcgtagcaagttatctttgccaagcgtggaggcgactaaagatagaattggtgaagtggccgtcgctgttactggttgtccctcttgcagctgcgatttacttaaattttattactcatcacttttggattgatatccgtttttggttagcggggcttgtcatcatcgtcttttggccatcatgggttacatatgaagtgaatgaaactcgttaccggatgccacttgcactctcttttgtgctcatcggattttttatatggatagccgaaaatattgcaacgttttttggggcttgggaatatccgaaccaaaccgatgcatggagtcttgttcatttggggaaggtcagttcatggcttttattagtgattgttagttttctgatcgtcgcgacattaaaacaggtgaaggggaaaaggcgcactggagtagatgctagtcaatctttataaaaagcagtgctttagtttagtaaggaactttgcgtttttacgattcttattattttgccagtgcaaacaggtgcttttttgaagaaacctatagatggcacaagtataatagtagtaaagttgaggaggcaacatttacttcgtattatacgcagttctttttggtgcgaaccccaagcgcacataaaatccctagatcacccgcaccaaaaaagagcttaattatgaaaaaatatgtatgaaaatggcgaaatgttgctcgttgtccatgatatgataagtgaaagagcggtttttacctattattgattgttcttcttccaataattaggggaatttcgcagtcgcactttttgtgagtgcgtggattgaaatcaaaaaggatcagcgatgaagcgttttgccagatagtcgcactttttgtgagtgcgtggattgaaataactagcaaggaaaaatgcaaaatctcaattactgtcgcactttttgtgagtgcgtggattgaaattgtctctgacattactacccccctgttagctagggtcgcactttttgtgagtgcgtggattgaaatatacgcccttggcgcggcatggcgctttttgttagtcgcactctttgtgagtgcgtggattgaaatcattttaggagttgacgcagcgaacatccgtttatcgtcgcactctttttatgagtgcgtgggattgaaatccgtctacgcacccaatcaccagggtcgccatcgtcacactcctggcgagtacgtgggttaaataaaggcgggagtaagcccctcgcgcttgctcccttgtcacacgagtgcgtcgctaagtttctagctatagaattccgaccccagcttgcataaaaaatccccttttctcggaatctccccaatttcccgcgccccaaaaatgtagccacatttttattgctcataaaattttcctaaatggtaatatgtttaaaaagactagatacggggggagcgaaattggaaattcgtacagtgaaagactctgactacttatgtaatttctccactaattaataagtggtggggtggaagaaagatgtctgataagttgcccaaattatttttcgaccactttagcaatacaagtttcattgctgaaaaggatgaaaaacttattggctttctaataggattcctttctcaatcacatcaaaaagtagcctatatacattttgttggagttcaccctgattacagaaagcaaagcgttggcaaacatttatacaatcaattttttcatgtggttcagcaaaacgggcgaagtattgttcgctgtgtaacttctcctgtcaataaaacttcaattgcctttcataccaagatgggattttgtattgaagagggagacaaaaagatggatggtatttttgtaaataccgactatgatggaccgcacgaagacagagttttatttgagaaacgtttaatctaagtcacgatttgcttttctaggcatggaaggataatagcgtccgcttaaaaaagagagccaagagttcaactcctggctctaattaggcttataagattcgaatgcccttttttatgattcatgaatttagtatctctacatacccatctgttccgtttaccctgatcctttgtccatccttaatcagcttggtggcattttctaccccgacaactgctggcaagccatattcacgtgcgatcactgctccgtgggtcatcagtccgccaacttcggtgactaggccttttatggatacaaataatggcgtccagcctgggtcggtaaaggaagtgactaatatatcgccatcttccaggtcggcattctcgatgtttaaaatgacactagctcttccttctatcactccggtagaaacagcaagacctgcaatcgcattagccggtaaatttgcttgcttgtacgcacctgtaatgatttcgccatcagacgtgattacccgtgggggagttagtttttcatatcgtttgtactcgtctttccgtttgttgatgatctggtcatctgtttttttggtgcgggcaacttcgtgaagttcttcaaaagtgagatagtatatatcttccttttcctgaataacgcctgcttgtacgagttgttcggcttctttcaataaagcctgcttatatacgaaatagcgacttactatgccgtattttggatattctcggtagccgatgaaattccggatgaggtcgatcctttgttttgtttctttggctttttgttcaccatccggtaattgcttcaatcgatttattaactcttgttctttttctaaagcaacgcgccggccttgctcaaactttcgattgccttcattaggctcaaagttgttgatatgactaagaatcatcggaacaagtgtaattggtttttcactccaacgagttcttgtaatatcgatttctccgggacagcgcattccgtatttgtcaagataagcatcaatagcgttcctagcttcctgtccgccatcaaacttaaccagttcatcgagaaaattgtcttctattgcatgctgcaaataatcaatcacttctgggtaagggcgaatcacatccgcgacatccattagcgccagacccatttccgaagtaatattatgcggtacagatagagaaagcgtatctgctgcgtttttttcgcctagccactcgttcatgttttcgttgatccatgttgtagcattaatagcagccataaacacagccgtactttgcgggtcaaataagatcttctttaattgctcgatatcttccagaataaaatcaaacaaatccaatcccgatttcgcttggatgttttgttttaactgttcgattgatgtttgactgcgcttaattaatttagaaacaattgtcggatcagtctcgaattgttccgacatacctttatgactattgcctggatttgatgcggattgatccgttggcaacaattttatataatcttgctcgattacggtcatgagtgcgctttttgtgagcggatccgatcccacggtatttaataaggcttcccggccggcacgtgtagttaacctaggtgcaacatcaacaaacaaccgcccgccggctttacgcataggtgcaggagtaattaacaggtaaaaagacaaccccaacggttttatcggatctgtcatcatttgctgatgaccaactgataaataaacgtgattttcttgatcatttgtttcagggattgggtaaagagtagtgatcggccggctttggacaatataaaatgtatcattagccaaacaccattcgatatcttgcggctggccgaaatgcgcttcgatctgtcttccgatgcgtgctagttgtaaaatctgttgatcagtaagtgtttgtgtcttttgctgatcaggatcgatctgttgagtctccgttccgccttcttctcgtccatagatagccaattttttggttgctatcctcttatcgacaatttgatcttcccgtactttataacaatctgcagagaccaagccggagaccagagcttctccaagtccaaaaccggcatcaatggatagcacctttcggttagaagtcattggatcagcggtaaataaaatccctgaagcctgcgggaaaaccatcttttgaacgattacggataaataaacttgactgtgatcgaagccgttctgcatacggtagatgactgcgcgatccgtaaatagcgaagcccagcatttgctgatatgctgcaagatcgcatccttgccgataatatttaaaaaggtatcttgttgcccagcaaaagaagcatgtggcaaatcttcagcagtcgcgctagaacgcactgcataagcatgtttttcgccaaactgggagagatagtgagcaacggctttcacaacgtctgaaggaatttctacttctagaatgagttctcgaatcttcctgctaatttcaccaatttgatcccggtcctcaacttttagtgtggccagttgagccagcaacgcttggaacgtgtcgttttgtttgatggctttttgaaatcctgttgttgtgacacaaaagccttctggtacttggattccttgaatttttgataattcccctaaatttaacccttttccgccaacaagcaaaagctgcttttcatccatttcctgaaaaccaagaaccaaagaactcattcaatatctctcctttcaaatcttaacattctaatgaattttagcagcagtcaatgagaatgaatagtctataataacttgtgtctatatgctataattaatctagggaaagtgtaacttttttaacatagctaaccgtactgtaaacgggtgacccgtttcaacctctagaaagcaattcatacctcctttcgtccacaacgaatatcgttaaaacccgattttaagaacagccttgatgaacaagcgcatgtaaaagagcagaagagaatgacattgattgcccttcttagtatttaaaagaatagaagtggtgtttttttggtgcgaaccctaagcgcacataaaacccctagatcacccgcaccaaaaaagagcctaattatgaaaaagcatgtgtaaaaatggtgaaatgttgtctgtgtgccatgatagaataaaggaaaagagcggctttttcctattattgattgttttacttccaataattacggggatttcgctgtcgcactcttagtgagtgcgtggattgaaatgatgacagggtttaatgatacaaatatcctccctgtcgcactcttagtgagtgcgtggattgaaataccgaactcggtaaagaatgaaacaatcgcttttcgtcgcactccttgtgagtgcgtggattgaaataacgatttcctcttgattgattttaataatcattgtcgcactccttgtgagtgcgtggattgaaatttcgctcacgtcaggcttcaatgattttgactgggtcgcactccttgtgagtgcgtggattgaaatattaaacaatatatcgtcggaaataatgcgggttgtcgcactccttgtgagtgcgtggattgaaattcagcgcaagtctttccgtagcccctacgctggctaagtcgcactccttgtgagtgcgtggattgaaataggattaccagtctacaaaagattggacgcttgagtcgcacttttagtgagtgcatggattgaaacacgctgctgccgtagcaaatgaatttagctcaatggaagaaagaggacgaattatcaattttttcacttctgtcgtcggtcaaatgtttccaacgtatagtgggtacgctgattggcttgaatgctggcgccttattgtttgttgttgtcgcgtttacgtttctggcggtttcgtcattcctgtttggctgcaaccagcgatagtcatttccgacaagggcacatcttctggttatggcgtttttattttaaaatcgacaccgaggcactggtttttaccgcttggcgctaaccaatgctgacgcctttcattcaataaaaatcatctttagtaaagccattaatcaaatcgatcaatctagataaatggattgtatgcgcgtcttctttacgggtacaaaggtaaacaggccgtttaatctcgatatcttttacaagaactttgcctagttcatttcggtgaatatggtctttgacggcaagtgagggggcaagcatcgcgccataacctgcaagaacagatcggattgattcgttaagcccgtgaaattggatgccaatgtttgggacagggacattatgaaggttgcataaggaaaaaaggacttctcttgtagaactcccctcttctctcactagaaatggctcgtccattaaatcgtgcaatgagacctcttgtccatcatatttatgccctgtggggacaataaaccaaaactcaatatccataagatgatgaagttggatggtgggatggtgccattcttcttttaccacaaacgcaatgtccgatttatagtgtagaagctggtcaaccacttgataggaattgccgctagaaaggttgatttttacagacggataagccaatttaaactttgccaaccaggttgggagtaaataattggctggtagagacgtagaagaaatatgaagttcttgcaattctccatcctttaattggatgagcttattttcaatgtcttgttccatattgaataagctttccgcccgcttgactagaaattctccttctttcgtaaggttgattcctcttccttctgtttttattagttttagtcccgtctctttttccaaatttcttatttgaatcgtgactgccggttgactgatagaaagagcgtcagcagccttagttacacttttcagagcagccactttcgtaaaaatacgcaaggcgtgaaggttcatgatcggctccctttcataaaatatttttataaatgtacaaaaaagatatattagatttatctgttttcattatataccctgtaagtaatgaactgaaaaggagtatttaatgaaacacatacgatatggattactagttttcatgataataagttttagttttggccgttctatagtcgataatcatcttgcccttttggttgtgatcggaatgttgtcttcttttatagggactttagcaggaggaggaggtttgatcaccgttccagcgatgatgttaactggcattccgattcaaacaagcattgcgacgaataagttttcttctggaattgccgccatgtctagtgtcttttatttagtcaatcgtcgccagcttacgatacaggcaatcgttaaaactgtagccactgcctttgtcggagggattgctggtgcgttgcttaccgcatatatttcagaaaaaacgatgaatgtcgtggcatttgtgctgcttttctttgccttgatcgtcactgtgggaagcaagaattgggccaaggggagaaagggcgaagaagttacgctttctcctcaaagctggcggccatggactcctttgtttatcgcagcctatgatggagggtttggtcccggttcttctacatttggaattttgtattacatgaaaaaacatcatacctatttaaaagcagtccagctaacacgagtattaattttaggaagctgcgtcggtggttttctcgtattctatcaaaccgggttctttcaatggccgtatgcagtcgcactggcgatcggttccacggtcggttcccaagttggcttgcttgtcctaccgaaagttccaatgaaactggcgaagggattattactaacagtcacgtgcctattgattttatcaattgtttataaattggtgtgaagggcgccgatttgaaagtgaaaacaaaacctaaaaaagcgtgtacagtctcattgctgtacgccttttttaggtctttataaactgagcatactctaaaacgaatccttattgttaacggtcatgttgacccgaagatacttctaaagcgtataataagaaatcaaaaaggaggggtgggcttgtttcagcaattgtatcagcttcttggtcttagtcggtttcggcgcaaaattttaatcatctttcttttgttttcgattatgcctattttgtttatcgggtttgtatctaaacagttggcagaccgaagcctcattgaaacgtatagagaacgtaatcaagcgcaactagtcaatgcaagcaaattgatcgaccgttcgttggaagatattgtgaacattcagcgtttaatattggcggaccgctcgattcgccacgagctggtcagaagcaatgagcaagtatacgaaggagacgagacgattggtgttgatacgtaccggaacttgcagcggttattgtccaattatttggttgaccagcgttatgtcgattcggtttgtctatttgatgcgttttttcgctctgtctgccatggcggcagcgctgaaagagaggcacagacctttcagacaaaaaagtggtatttggatgcgttaaatgaaaatggcggtgagttgctgtttgcagagaatgtattggctgaagagaaagatacattttcttacgtgaaatcgttgcgtaatccagaagaatttaaattggatcggattgggttacttgtagtaacgattgataagtcgctgttagaagatgttaatacaagccaagaaagtgatttgatcgttcagtcagaagattatacagttttggatacaaggacggatggcggcaaaagcgatggcgttgatgaagcctcattagaatcggaaaactacattttcgatgcgtatacaaattcggcttctggttggaaactatattccgttataagcgaggacaaattgctgggacagctaaacaatattggcgctgtcacattagcactaggcgggggaatgtctgtgttgttaatgattgtgatgatccctgtatcgcgacgattaagtggccctttatcgcaagtttatgaaagcgctatccaattatttggttggcctcctaatgaacaaaaaagagggttggatgagttaaaagtgattgatggaacatttaagcgtgttgctttccaacataaacaactaaatgaacggttaatggaggcaaaactacgggaaaaggaggcggagctaaaattattgcaggcgcaaatcaatcctcattttttatataatacgttgtcgtctatttactggctggcaaaaatgaaaaaacagtccgagattgcgcaaatggcgatctcactatctgaaagtttcaaaattagcttgaacaacggaaaagaacacatccctctccaaaaagagttggaacatattcgacactacattacgattcaaaacatccggtttcgagggaaattccaatacaaagaagaaattgatgaccgtttattaaatgtcgagattattaaactattgctgcagccgctgatcgagaatgcgattatccatggcttagaaaagaaggaaagcactggccgcgttttgctgcgggcttttgtagagggggatacactcgtgtttcaaattaaagacgatggagttggaatggaacatacatcccaagcaatgcacggatttgggttaaaaaatgttcatgaacgaattcagctttattacggaggaaaaagtgggttgacgattgcaagtgccgtcaatcaaggtacggtggtgacggtgcgtttacaacttagaaagggagagatcttatgcttcgggtaatcattgtcgatgatgaaccattaatggtagaaggcatggtgcaaatggttgactgggaagcaaatggggcgaaagtagttggcacggcacacagtggtggtgaagcccttgtactagtagagaaggaaaaacctgatttgatttttacagacattgagatgcccgggatggacgggcttgattttttagaagcaatcaaaccgatttcgcccgattcgctattgtttctttttagcgcccatactgattttcattatgccaagcgggcattaaagctaggcgtgcttgattatttagtcaagccagtcacagttccgatgatcgaagatgcccttgaccgggcgctcgtccaagaacgcaagctcgaacaaaaagggggtggtcgccctgaaaaagcgaaccaccaggcgatccgaaaagcgttggcttttattgctgaacggtataatcacgatataacgatagagcatgtagcggaacatattggcatgaacgcttcctatttcagcacattgtttaaaaaggaaatgggcgtatcatatatcaaatacgtgacgaaataccggatggaaatagcgaaacagttgttgctgatgggtgaaaaagtaatggatgtaagtgaaaaagttggctatcaatcgtaccgccatttttccgaaacatttaaaaagcagtaccagataacgccaagcgagttaaaaacgaaagggaggactgaataacggacggaatatgctgatgagtttgtctaggacattacggcgactatttgaaccaaagaaatatacgtgaggcaagactagtgacggtctcacgcagccttgaataatttagcctgtcgccaaaggttctcagtttaaccgaggtaatcgacaggctgttatggaccgatgcccgaccgaaaaaacatcctgtcgacaaacgctcgcactcgattctattccttagtaaaccgatcttgttcttcaaattcaaacacaattgattttacattgtgtaaattctcttccgcaaatgtatcttggtcattctcatccccaatatacaccattgcattggtctctatttgatagatcaaattgtataagtatgccagcacatggacgggcgttccatctctaggactttcctgaacatagacgccattttcaaagataaatgttgccttcaatgcaatcactccttttctataatttatacgagaggaataagtttctcaatatttatgaaaatcttacatgagttgactaattcaagcgttaaacacggttatgcttttttacctaaaaaaagcggacataaaccaatttttgaagcgcttacaaaaatcgtttttccgtcttagactaataaaaaaggaggggaacgaatgaaacagttgacttttccacttatgatgcttgcttcaattgttttcgtcggagggtgttcatcaagttctggtggagaaatggaaagcagtggcggcgaaagggaaattcattatttatcaaatcgcacggccaatcaaggccaaccacgtattgtgatgccgatcatggaacaattccagcagaacaatcctgatgtatctcttgatctagaaacgattgagcaatcggatcttgttcagcgtatccaactgttaacggcaagcaatgcgttgccagacatgtttgtgtatgaatctgctcagctggatgatcttatttcaggtgattatattgtcaatattgaagaagcgttaggagaagccggtttgctagataatgttcgcccagcagcgctcgatttaatgcggcagttaagcgacactggagaaatgtatgcggttccaatggaattgaatattgaagggttctggtacaacaaagagatttttcaatctctcgggttagaagaaccacagacgtgggacgagctgatggccatcagcgatgtacttttagaaaatgagattcaaccatttgcgttagcaggacaagaccgttggccgatcacacgatttattaatgcgtatgcagtccggtattacggggttgatgcgatgcaacgtgtagcagatggagatttatcgattaccgatgaaggcttcattaaagccgcaaaaacggtgcaagaaatgagtgaacgtggctacttcggacaaggggtcaacgcgatggattatgatgcggcaacggcttcgtttttaactggccagtcggcgatgtattacatgggcagctgggcattaggggaaatgaatgacgaaaatcaaaaccatataggcgggccagagaacattggcttttttaatgtgcctgttgtggagggcggtgtcggaacacttgaggactatatgatgaatgcagggatcgtcaccgtcttttctaaagcaggctttgatgagccgacacgggaatggtttacctatttgtacactcattatgcagaccgggcgatgagtgagcatgggatggtttctggtttggcgacaagtatagagccaaatgacgatgatccattaaccaagcttgtccttgacgaactagagcaagcggaaagcagcgctttatggtttgaagcaacatttaatgcacgcaaacaggagcttgcagaaacaaatgcacagcagttgatcgagggatcgctgactccagaacagttcatgagtgcccttgatgagtgacaaaacatgaaagggttggccgcacgtgcttgccctttgaaaggaggagcgcttgatggataaagtgttaggaaataaaaaaacaatcctattttttgtggggccagcgttgcttttgtatcttctattattaattgtgccaacgatttggtcgatcggctattcctttttttccggatcgccgcttcgtgggtttgactttgttgggtttgataactatacggttgctttaagagacaagcattttttagatagcctctttgcaagcatacgctatgcggcatttgtcacgaccggccaagttgcccttgggctgtgcttggcgttgttatttgtctttttcttaaaaaaacactcatcacttatacgaacattggtcttttttcctgttattttgccagcagtggcagttgcccagctgttttcaaagctttttgaattctcgccgcagctagggttgatcaatgacttgcttgccgcgctccatttagattcgtacgtccaagcatggctggcgcaaggagatacggcatttgccgtattggtcataatggacatttggcgctctatcgggttttacgcagtcattctttacgccggtttaatcgatgtgcccgatgatgtgattgaagcagcacggctcgacggggctagcgggttgcgccttgtgacaagcattgtccttccaatgattaggccgattttgttgtcagccgtcatctttagtttaaatgggacactaaaagtgtttgaatcagctgttgccttaacagggggagggcctgggaacagtaccacaatgcttacgatgtatatgtacaataccgccttttcttacggagagtatgggtatgggagcgcaattgccgtgtatttgctcatcatatgtttgctcgtaacattattgatttaccggttcgccagaaagaacattgcctagaagggaggaatcgcgatgaaagcaacgcttgctgaacgtgcagcaacgataggggcaggcaaaaaaagaggcgtttggctatctgtgctcggaaaagggttggtcggtgtctttttgcttataaccgtttatccagtgatttggttgttgttgtcttcgttaaaagaaccgtctgaatttatgacaaactcaatgaatgcgttgcctgaggggttttacctaggaaactacgtagaagcgtggaaaacaggaaatatgggcatttattttcgcaatagcatcttcgtgacttttcctgcgctcataggcattgtcctctttggttcaatggcggcatttgcgattgaaaagttgcgctggaagttaaaaaacgtagtcatgctgttgtttttagcagggattatgattccagtgcaaattgttttgctgccgttattccaaatctatttcaatatcaatttgctgaatagcttgtttggactcggccttgtctatttggtgtttggcttgccgctgaccatctttttatttgcaagctattttaaatcgatgcctaatgagttaatggaagccgctgttgtggatggagcgtccatttaccaaatctttttcacgcttgcgttgccgttgcttaaaaacgcgattgtcactgtcgctcttgtgcaattcttttttgtctggaatgacttaatctttgcaatgagctttattcgcgattcagatcttcggacgatccagacagggttaatgggctttgccggtgaatatggacaaagagaatgggggccgacttttgcctctattgccctagcggttgtgcccatcttactgttgtacacgtttttgaataagcttgtcatgaaaggcatgacaagtggagcagtgaaaggataaaggaggagcgggctaatgattgctgtgaaagaaatgcggtgtgaggataggctaaatccgatcggcctagatcgccaatcgccacagtttagttggattacgaaaagcgatcgacctgattatgagcagacacgttatgaaattcaagtaagcatggatgcagaaggaaaggaagcaatatggtccaagcgtgttttttccagtcagtcgcttgctgtccgctatgaggggccgccgctggaatcatacaaacgttactactggcgtgtccgtgtatgggcaggagaggaaaaatctgattggagtggcgcctctttttttgaaatgggcattttggaagccactgagtggaaaggggactggattacaagcgcagctaatagcgatgccaatacatttgcttgtgcccgccagtttcaggcaaagaaaccaatcacaaaggcgattttgtatgctacaagcttaggactttacgaattaatgttaaatgggcagcgtgtcggccattatgcattaacgccaggatggaccaactaccatgatcggatccaataccaggcgtatgatgtcagcttccatctaaaggaaacgaatgagcttcgtgctcttgtcggagagggctggtatagcggttacttagggtggaaagggcaaaagaatacgtacggcaataccaatgcattgttgctgcaactgagactcgtatacgaagatggttcagtcgattggatttatacagatgaaagctggcgggaactggcgacaccgattcaaatgtccgatttatataacggagaaacttacgatgggcgaattcagtttgaacaaatcggcgacatgcgtattttttcttacccaaaagcccatctcgttgctcaagaaaacgaaccagttgcagtgattgaacagataagaccaaagcggttatttagaacaccaaagcaagagctcgttctagatatggggcagaacatggttggcgtcattgaatttaaggtgagaggaaaagaagggcaaaagctccaactcattcatggggaagtccttgaccacgaaggcaacttttaccgtgctaatttgcgggccgccgagcaaacggtttcttatatttgcagtggagagggcgaggcggtatacagaccccattttacattccaaggcttccagtttgttaaacttgtcggtttctcagaagacgtcagcatcgacgattttactggtttggttatgcattcagacatggagcaaacaggcgatttccacacatctgattcgtcaatcaaccagcttcaacataatatcctctgggggcaaaaaggcaattttgttgatgtgccaaccgattgtccgcaacggaatgagcggcttggctggacaggggatgcacaaatattcattcgtacagccaactttaatatgggaaccaaacgtttctttcaaaaatggcttcgcgatttggcctataaccaaagtggagacggttctgtgccatttgtcgtccctgatattttaaatggagagttctcagggaacaaaggccgcacatgcgctgcctggggagatgcagccgttatttgcccgtggacgctgtactggagctttggagacgaacaagtcctttacgaacaatacgaaagcatgaaagcatgggtggactatattcgcagcacaagtgaggacggcctcctctggcaaaatgaatttcaattaggcgactggcttgctttagatgccgaggaaaatagctactacggagcaacagacaatgatttagtcgcttcggcttattacgcttattccacaaagcttcttgcaaaaacggcccgtgtcattggcaaagtcgacgattaccatcaatacaaggcattgtttaagcaaatcaaacaagcataccaaaaggcgtacatgactgcgcctaacaggctgtactctgacacacaaaccgcgtatgtgctcacgctccacttcggtttagcagaagaaacacaacggcaagggcttgcggcacggcttgtagaattaatccgccaaaatggcacccatttaacgacaggttttgtcggcacaccatacttgtgccatgcgttgtcagacaatggctacaccgatgtcgcctatgaattgttgtttcaacggacgtatccgtcttggctttaccaagttgatcgaggcgctacaacgatgtgggagcattgggacagcatcaaggaagatggttccttctggagcacagacatgaactcatttaaccattacgcttatggctcaattggtgattggatgtaccaacatatcattgggcttgatgccgttcaagcaggctacaaaacagcgatcattgcgccaaaacctacggaaaagctaacgtatgcaacgggcacccttaaaacaccatacggaaagctggcgtcggaatggcatttgcagggggaaacgctcacaataaaaggaaccgtaccggaaaacacaagcgcttatatttgcctcccagccgtagcaaaccaagaagaaatgaacgcgcttaatataaatccagcaagtattgcatcagaagaagcagaaacggttttcaggcacatgcgcgaagacagcgtcttaatcaagcaaggatcaggcccgttttcatacacatatcaagcaagaatggcaaaacaatagacgatacaacctttaggggagaagggtgttagaagggaaccgactcccctcaaacattttggtacgagtgaagaagattaataagaaaaagaagatgttttgcgagaaaggtttaatagcaaaaagaccagaagtcacatcgaggtcttttagtgttgttaagaaacaaggattttaaaattggggctgtgttttttcaagagccttttcttcgctccctggatacatactcctgcaaagatttttccaaccagttgctatcaaagtctggccaataaacttcaggaaaataaagttgggagtctcctgttagaaaggataaaaaatcggctgaattatgcggatcattccacgaacccgttcgaataatgaaatcaacacttggtaaatagccagtccaagaatgtttttttagtaaagaattaaatgtgagaggatccttattgatatttttttctagcacatggtcatctaataatgaaatgacagcttgcccgcgttctattttaccatcataagcaactaataatgttaatatgcccttgtcgttattagcggtcttcaccaacagtttttcaataatatcaatggtgtctttttctaaaaacgttctccaacttccacaaacctggacttttattttattttccatgatttttggatcgttcagtagctcagtaaattttttagcatataatttatgcatggctttcactaaacttttttctctatttttaagattatctacagaactgacccaaaaagtaacatagttaacacctttactaaacaatgcttccgttatatattgaaaatttgcggcacctttatcatatagtgagccttcagaaagtaaccctttctttttagcccaacgtctgtttccgtctggaataattgctatatgattgataaaattaataataatcctctccctaggaacattaactatacgctcatcataaagttttatttttccacttgtcaaacgataaacggaatcgttcaggaaacctatttgcttcgcaatcgtagcaactaagaagatagaaaagcgctttacataagctcggcaagaatggcaccggaagaagcggaaacggttttcaggcactcgcctagacagcgttttaatcaggcgagaatcaggcccaaattcacacatatatcaaacaataatggcgaaacagatacacaacctcatgtggggaagaagaaatggttagaggagctccatcaatcgtttccttgtgagcattcagtatgattaaagaagatcaaaaaacacttggtgcgaaccccaagcgcacataaaatccctagatcacccgcaccaaaaaagagcttaaatatgaaataatatgtgtaatgatggtaaaatgctgtctgtatgccatgatagaataaaagaaaggagcggcattttcctatacttgttgttttcctgtcaataaataggggaatttcgctgtcgcactctttgtgagtgcgtggattgaaatagcagggagaaccttttcaatcgatattcccatagtcgcactctttgtgagtgcgtggattgaaatataatatattcccaccaatctgtatcattgactatgtcgcactctttgtgagtgcgtggattgaaatcaacaacaggtcaagttgggcatggtactgtctttgtcgcactcttcgtaagtgcgtgctcgttcgtatgcaacctaataaccagtaggttatggacgtaaggcatttgggggaggtggatgtgccataaaacgaaaaccagtagttttaggtgtaggcgggcttctagtaattggtatggctgtaagtgcagtcatcttattgaatgcggacaaggattctgtgccagggagaacccaattaaaagagaatgaaagagactcgagtgattattggaccgcagacaacatgaaaaaagctgttccgggggcaggaatggaggactaacgcctgctcctcgaacagcttttgctagctagttggtgtttggtttcgttcgttatttttttctgaactggtgtttaaaacggttaaacggggtgaagtatgaaacggcgtagtctaagttaataagctcgctgtattcaaagacgcgcccgtcgttaagaatgccgcgattgacaattttcatggctgcgatgccttttttgcaatttaacaaattggcttgttcttttgttacgttgacggcactgtaagtggtaataaagtgggagatgtcgtagccgcattgctggacatattcatggacggagccggcagcaatttgttctgtcagatcagggaaataggagcagggaagctgtgttgtttcaatttggactttttggtaatcgacgatccggacgcgtgtaaactcccacacaaagtcgtttttcatatcgaatatgttttcaatttcaggcgtcatcttcttcttttgcatggcaatgaccgttgattgaatgtctttgaatttcttttcggttaacgaattataaataagggggctttccctaattgtttttgtgacaaacatgccagagccttgcacaacttgtacactgccgatgtttattaattttttgattgcttttcggattgtgtaacgagagacttggtagtgtgtggcgagggctctctccgttggcaatttttcgccaggggcatatttgttttgataaattttgcttagcaagtcatcggcgacaaattgtcttttcttcatgtttctcccctcatctaaggctgaatcgtttcatttagtataaaagccctgtttgcacactgcaagcaaggcttttatcgttatggcgtatgaatcgctccgtttggcaggcgagcctgtgtccactcatgttttcggtacacgactgggtagttttgcgccaacgtttcgtcaaatgacacaccaatgccaacttcatcaatcgggtaaatgtagccttgcttgacttggacggaaccgggaaacatttcctcaatgatggcttctggttcttggatttcttgaatggcagcctgatggaggtgaatgttcaagtgtgtgttgaccgctacaccgatcggcgtcatatccgacgggccatgccaggcaattttcacaccaaactggctgcataacgcgccgagctttaatgcaggtgtaattccgcctatttgtgaaacgtggcatcgaatgtaatcgatttgccgattggcaattaagtgcttccactccattgggttattaaacagttcgcctgtggcaataggagttgtacactgggcgcgtagttgggcgagccattcattttggtcagggggcaaaacgtcctctaaaaagtacggcttatacggttccaactctttggcaagctggatcgcttggatcggtgaaagccgttcgtggacatcgtgaagaaaatggaggctatagccatatttttcacgcagcgctttaaacatgcgcacgacatctctcatgtaaatgtcaggatcgtaatattccccttccagttgtcttactggtaagtgcatgtcatggtttttgccgccatatttgccaagttggcaacgaatatgtttaaaccctcgcttgattagcgcatctacgtttttgaacaattcttccaaagtaagcccgtccgcatgagcatatgcagcaatcgcgctttttgattttccgccaaataattggtagagcggcatgtttgcaagctttgctttcatatcccacaacgccatatcgatgccagcaatggcgttgttcataattgggccattgcgccagtatgcgttcaccatcatcatttgccataaatcttcaatatcgtgggcgtcacgcccgagcaaaagcggtgttaagtactggtcaacgaccattttgacaggaagcggtcgctgttggaacgtggcgcagccatagccagtaaggccaaggttggtcttgactttcaccaccacaaaattatggcgatggggattggtcacaaatgcttcaatagatgtaatgatgtttggttccacgggatgcactccttctcattgattcctttttatagaacggcatgaggacatagtttctacctgttttcctgttgattaaagcatatggaaaacaaggggtcaatttggttagaaatgcatcggctaaaacgagtatttaccataccaatttcgaatgaatatttgtgtaagtactgataaataaggattttacgtttttattggtattttttgaaacgttttcagtcgggggctcttatgctacgatatgcctgtcgatgatcatcaaattcgaaagtgaaggaaggctgcttcttatgaaagacaacgaacttattccacttatcattcaatatgtaggcggacaagacaacattaaaaaagtatggcactgtatgaccagacttcggtttgatttgcatgatttctcaaaaatagaacgtgatcaaataaaagagttacagggcgtagtaggagaacaactgaccaacgaccaataccaaatcgttattggcacgcatgtgcagaaagtctatgcagctctgacagaagagctagggcttgatgaagacaaaacgagcgcagagccagcaaagaaaaaaggctttttcggggcgattttagacattgtttctggcgtgtttggcccgatcgtgcctgcgattgcaggggcggggatgatcaaaggaattttggcggggctaattgcattggatgtgctatcgaatgagagtgatgccgtcattattcttgatctcgtggcgagctctgtgttttatttcttgcctttcttcttagcagcttcggcagccaaaatatttaaaacgaatccgtatttagcattggcggtcgcaggtggatttatgtatccatcgcttttggatgccgcgaaactaggggaagtgacccaattcagttttatgggactgcctgttccggtcattaactatagtgcaacggttattccgatcatcctgtctgtttgggcgttaagctatattaacaaatacgttgatcaatatatgccaaatgtgctgcgcacggtatttacaccgacgttaacgctgttcattgcgattccatttgcgctcattgccacaggtcccttaggtgcgtatgtcggcagcttgcttgcttcgtttattgaactgttgtttaatctttcgcctattttagcaggtgtagtagttggcggcattcgtccgattgcgattgtgtttggcatgcaccatgcgatgacgcccattgctttgcaaaatttcgctgacaacggctttgatatgatgatgccgatgttcttaatgacaaatatggcgattgcaggggccacgtttgcggtctttttcaaatcaaaaagcaaaaaggaaaaatcggttgtcttgtcggctggtgtatctgctttgcttggtatcacggaacctgcactatttggggtgttaattaaatacaaaaaagcgtttattgcttgtacaattgccagcatggctggtgcgacgttctttgcgcttcttggcgtccgcatttatggatatattctttcgagtattgtcagccttgtcgcttatgtcgggccgtacttctggttcgcaattcttggcattgtcttatcgattggaatagggttcgcagtgacgtacttcacacttaaaagcaaagaagtgaacagccattaatgtgaaaaaatgaacaacatggtgggggagaggagggagccatcgccgttatccaacaagaagggaatatgtttaagcaacttagggtacggcttcgctcagattttctaaaagcgccttgcccacatataaacgatttgccaactgcggggtttgcctggaaacaatggcgcaccgccagaatggcagctcgacttttttggaacggcggacaaagcaacgccgtttcttcatcgtttgcggcttttccatcttaacaggttaggccgtacgtttttcgatcaaagttcttactcgctcccctatatttcccattgctgcaagaaacgcctcttcctttaggtcatcaaagcaaaagaaggaagttggctactagaaaaagaataatagcaaaatgaatggagcatagcatgtgtagcaaatgaacgtgagacgctaaaacaaccattcaagggagcgatagagggatggcaaaaaagctgggagtggcttttctctttgtatggctgagcgctgctgtagctgggtgtggcatgtttgcagcgggaggacaagaaatagaagaaaaatcgaaatttgaagccggtgtaaaagagcctcctattcccacgatcacaatcggcaacgaaccatttcaaccagcgcttggcgcttattcctggggagttgaaaatagcagtggcaccgtgacaagtactgaagttgacattgctcctcctcctgagcaggcgaagcatatggagtcaattgctgttgctggggaagatgatcttgaaattgattttggttcagtccatccgccaaagccaatggatttacacatttgggaggacggaaaacgacgttttgtcgacggtgacatgcggttagctgattataaggggacgggttcagttattgttgagttgtatggcgagtggcacgaagggcatgcaagctacgtatttgtattagaagtacggtgatgtcgtatgctgcatcatatattgtaagttgtggaaatgaagcgaatcggctaggaaatcaaaacataggcttgtccgctttcgccacgttgccgcacaggcgaagttactggaaaacaaaagcggccatagcgtaagacaaattcttatgctatggccgctttttgttactgaaggggcgctgtaaaggaaacggtcgtgcctttgccgatttcgctagagacggaaaggccgtttcctagttgtttttggagccgtaaattcgtattggcgaggccaatgctttttttcgttgatttggtttgggtgaagagtgtattcagtgtgtcttggtccatgccgactccgtcgtctttaatcgcgatgtgcgcttttccgtcttttttgtacacatgcacttctaatgttccgcctgcttcttgctttaaaatgccatgaaggatggcgttttcggcaaggggctggatggaaagaggcggcaccaggcaatcaacatgctcgtcaatcgcccatttgacttgcagacgctcgccgaatcgttcttgttcgatgtacagataggagcggagcaagtcgagttcttcacttagcgggatgacaggcgacagttttttttcgttgaagctggcgcgcaaatagcggccaaattcagcgattaaatcgagcatcctgtctgtgtcaacggtgctaagggaggcgatggtgtttagcgtattaaataaaaagtgtggttcaatttgcgcttgcagccaggcggcttcgaggcgcaatcggtcttcgattgattgctttaaggcgagcatggcctcaatccgtgtttgtagttcgagcaaatcgactggtttgccgatataatcgtttgccccggcgcggaagcctgcgtaaatgtcttctggctgtatccgggctgtaacgagcaaaatcggcaactcggaaaccgaataggtttggcggatgtgcttgacgagctcaaggcctgacatttccggcatcatgacgtcagcaatcactaaatcccagcgttcttctgctactttccgcagcgtggctttaggtgacgtctctgtcaccaactggtatggctttgtcgatagggcgtggcgcaacacttttaagttgacggggtcgtcgtcaacagcgagtatccgaaatggcgcttccctctcaggctgttgtggcgcttcggcagcggcaacttcgtttggttgttcagtcgttagggcggtggcgatggcttgatggttggcgctttttgctaatggcaacgtgaaggaaaagcttgaaccttggccaggcgaagagacgacgttgatttgaccgccatgcatttctacgagctctttgcaaatcgctagtccaagccctaatccttcgttgtcagcatttgccccttgttcgtatggttcaaaaatgcgtgcctttgtgctttggtccattcctaatcctgtgtcgatgacgcggatcgttgccagcttccctgaatgggaagcggcaatcgtgattgtgccttcgttcgtgaacttgccggcattgtgaagcaagttaaacaaaatttggcttacgcgattggcgtcggcaaacacaagcggaaaatcgttcgggatagcgacaacgaaacgggttttttcattgtcgattaagaagttcaacgtatccaaagtccggcgaatgattggctcaagttggatagcttcttgttgcaatgtcaactttcgctctttaaatacagctaggtcgattaaatcattaagcaagtaagacatgcgacggcctattgaaacgagcaactctaaactttgttggcttttttggtcaagaacttgtttgttttctgttgcgacagtttgggcgatgttcatcatcccgtgtaatgggttccgcatttcatgggatgtggaagcaagaaattggtccttctgtttatactctcgttgtagcttcgccaacaatgtcgcattttcgtcttcggcatggaaaaaccgtaaaaaccaaaagcttgaaaaacatagaaacgcaaccgttaaatcaacagggtaaaacattagtgttggcatagcaacactatcgacgtaacggtaaagcatcatccataggacgttggaggcaaccgccagtgctgccaaatagagcagcaaagccccttttagttgggcctgtacgattttcagcatgataaacgtgatcgtgctaaatgcaaacacaatagcaaccgccagcaagaaccccgttttatgtaaaagggagagtggcacaagtaaaagataaacaaaataaaggccaaacagtgtagaagccacacgtactgtccgtttgtaagaaggagcaaatgtgcgcaagacgaacaacaaaaacgagagcgagagcccggcgtaaaataaatatgtcaagcgcttatcccattcactgtttaacgcaataaagtaaccgagtactttgttgtctgatattaggacagacgctgctgcaaagaaagcggccaatgcaaagaagaggatgcccttttttgcaggtttgatggccttcaaaatacaggcatatatggcatgaatgagcatgatggcggctacagccatttgtaaaagcgattcaatagcattttttctctctatgttttcgctcggaccaaaataaagcgaacgaggcgttggcagccaagagtggcggtcaatctcttccagttgaaacgttagccggatcagtccgttctcatcaggctggatagaggcaagaacggtcggcgacatttgtcggttttgcgtagaggtttgatacaagcgttgcccatttgctgacactgaaagaatcccatgaggcaaatgaatataaaatccataatagcgctcagtatcttgtacttgcagatcgagctggtacgtaccttgcagttccagttccgtcggccctgggatcgttttaagtgcctgttcctcgctgtgtaaagggataaatttccattcgccttccagtgacacataaccaggttgggaaaaagcaaaatcgcttaagtcgagtacgccgtttttagcggttggctgatctggcaaacctgtcatcgcgttccacactaaacgaataataagcagagcaagtaaaaatacacatacgataagaagctgtttcttagtgggcataggcgactccttcaaatccaagcaactttcaccttctaaaaggtgagcctgttcatttgcgatatagggatcattattctgttagttgttttctgcattcgtcatgtagtttgataagttcaggggagggggcgatcgcaaattcttcgtcgagcatgtggacgagcttattatattgcttttcgaaataaaagggctcgtttaacgctgcgtaaattctcatgagcatacaatagctttcctccagaaatgggtacatttcttggattttttggcctagtctagcagcttgctcgtatcggccttgttcaaacaggtagtccgccacggcagtcgccgtttcacgccacaggttttttaaatgttcacgtctattttcagcccaaaggtaatcttcttcgtgtaaataatcacctcggtattcatccagtaatgtaaggtaggcaggaagtgtgctgtctgaaagcgctggaagctggctccatttcttttcccattccaaataatcaatgtggatgtcgccaacttctaatgtgtagctctgctcaaagttgtcaatacgaatggaagggaatacgctagtaagcgtttttcggatcaaatagacagtcgaatacagttgggcataggcttttttgtagtcgctgtctggccaaaaagtctcgatgatcacgtctttgcggacatggtgtccaaggtggtgtagcaaaaataaaaacaaccctttcgctttggaggttcgccaatggatatgaatcggtttttctccagaaaagaattgtaacgaagggaggcagcatatcgttgttttttcagcagggatactttcctgctgttttttcgtttgtaggcgttcaagcgtcttttttagtctattcttgctaattggtttcatgatgtaatcgactgcatttaattcaaatgctttgactgcatattcttgataggcggtgacaaacacaatttggatgtcagggtgtttgcttagaaccgtttcggccagttccatgccgtttacattggcaatttcaatatctaaaaacaacaaatctggcggtgtgctcagcacccagtcgagcgctgtagaagcagaagtaaatgatccggtgatttcaacatctccaaccccaagcagctggttttccaagaaagtcagtgcatgaggctcatcatccacgagcacagctttcatacggagccccccttttttcaatgttttttcttcattatagcaatttcttcccagataacctactgaaatttgaaaaaactagtaataaattcggtgtagcgaactatataggttttgtagagatgggtttgatacatttcgttaggctgatcaatgcctgaaaaggcgttttttggtgaaaatgcaaaaaggaggggacaagaatgaagaacaaagctactgcgatagtgctaatttttgttttgctggtgcaaacatttattgcccagttagcaggagcggtgcaagtgtatgcacaagagccggaggccagcacatttgaagctttggctagccttgttgatgaaaacggggagccattaacagaagaggccacactagcagcagaagaccaagtgcatgtaaagattgattggtcattaaccggacacacacaacaagagacataccacataaagttgccagagcaatggcagccagacaagattgaatggaaagacgaaggacatggggacgagatggttacatactcgctaaatggaacagaactgaccatgtctttcccggagcaggaggaagctgtacaggcaagcggcacggttgaactttctgcttatttttcgcaagatgcaattggtgaagccgcggaaaccgatcttgtctttctaattggagacacagcgcaagtcattccagtgtcttttcaggtaaaagaagaactggagcaggagcctgtacaagaagaggcgccagcgtctagtgaagaagaacaagtaaacgaggaaggcgacacgcctgaatcgaaagagcaagcgccagaaacggaaaaagaagaggaaacgccagtggtagacgaggaacaagtcgctgctgaagaaaagcaagaagatgcaaggaaggaagaacaagaagaagcaagtaaagaaaaggaagaaaatgtagaggcgaatgatcaagaggcggacacgacagaatcagcggaagccgatgtagtgagccaggcagttgtcggggaaattgagaaaaatattattacaggcatcgtccttcgggatggggacggcaatttgatcaacgctgatgaaaatccaggaaacaagccagcgctcggtgatgatgttcaaatcgaaatcacctgggagcttccaaatggccatggttatggaagtggctcgacatttacgttttccttgccagacattttccacgtttacaatgacgtgaatggtgagctcacatttggagatacaacagtcggttcttttacgttaaaggaagatggcacggttgttatgacattcaacgaacaaatcgaggaattatcgaatgtccatgggctgctcaactttcggacaattattcgtgaggaccttgtaggcgacgtcgatcgcgaagtcgtgtttgacgtcaaagatgaagtggtggccaacattccaatttcgctccaaccgaaggcaggatcggccatcgataaacgggggcaagtaaaccgtgcctacaatgcaacagaaattgagtggactgtcgattttaacaaacagttaaaatcaatcaatcaagctgtgctgaaagatccgattcaacagcaccaagcattgaaaaaaggttcaattgaagtctataaactggatgtccagcttgacggcactgttaagcaaggcgagcgggtagacccgagcgcgtatacggtcacagaagacccgtttgacattcagtttggcgatatttcttctgcttatcgggtcgtattttccacagagattaccgacgaagacggcacgaactatgccaataaagcgacattaacaggcaagaatagtgaggatctgtcggcagaagcaagtgtaacaacaagacgcggccaggcactagcaaagcgcaatgcaagctacgatccagctacacaaacgattacgtgggaaatccattataattacaacgaaaaatcgattaaacaagcagacgctctgttggtcgactcgtttagcgaaagccacgacttgattgccgattcaataaaagtggagcgcattacccttgatgagaacggcaacgaaaaagaagcatcgaacgcagacaattatgcagtaacgccagggcaacacggttttgagctgaagtttacagaagacatcaacgatgcctacaagattacgtacaagacgaaagcaaatgaacgggtcttggaagacggcaagattgataacattgttcaatcaggtggaagagaagcaaagggaagccaaggaacgagccagcaagtgctccataaaggctattccaacatcaactataaagacaaaacggtccaatggcgcattgactttaaccgcgatggctatgaaatgaaagacgtgttctttaccgatacgtttacgaacggtgggttagagctagaaagagattcgtttaaagtgttgcggaaagggacagaagtcgacccatcggaatatacgttggcagaaacagatgaaggctttacgctccgcttccatgaaccaatttccgaaccacatcagatcgtatatacaacgaagttccactacgacgagctgaaaggtgaccaattccgaaaccacgttcatatgaagtggacaacggaagacgggaaaacgtgggaaaaagaggcatcttcaggtttcaaaccggacacgtatacaacgaacaatggctttaaaaatggttcttataatgcggtgacgaaagaaatcacgtggacagtcggcattaactacgacttaaagaacttgacggtgatgaacgtcacagattacatcaaaggaaaacaaacgcttgtcgaaggttcgattgaagtgtatcgagccgaattgacaggcggcaacaacggcattagaaaaggcgagaaactgagtccaagcgaatatgaactagatttgctttcagatgagaagccaggtttccatgtgcgttttccaggcgaacgcgacgacgcttatatcattgaatacaaaacaagtgtggaaggcgagttaatcgtcgaccgctatgacaacacagctacccttagcagtgaagggcgagagccagttgatttaaacgcccatgtgactgttcaacatggtggcagctacgtgaaaaaagcaggcaaacaaaatggcaatgtcattgattggaacgttgctattaacgctggccaatcaaaagtatccgatgcaaaagtcatcgaccaacaacaagcgaaccaaatcttgcttgaagactcgttccgcctgtatgcaacaacggtcagcgggaacgggcagtttgcaaaagcagaagagctggaacgtgacaaagactatacgcttgaaatcaacacggctgatgacggatcgcaaacgtttgtcctctccttcttagaggacatcaccaggccgtatatcctcgaataccagtcttacattaatgcaagcgatggcgaggaaattagcaatacgattaaatttgaaggcaaacaaattacaactgaaagaacggactcaagtgaaacgatcaaagtccggctcactgatggcggcggcagtggctcagggaaacgcggcagtctcgaagtcattaaagtcgacgccaacagcaaggaagtgttgccaggtgcacgctttacgctgtatgacaaagaaggcaaaattgctttacgcactgtcgtgacagacgaagacggcaaagcgatattccggaacttgcgctacgacgattatttgttaaaagaagacagtgcccctgatgggtatgttgtcggtatcgatgaaaaaatcgtaaaagtagacagcgaaacgacaacaatcacggtggaaaacaagaaaatcacccgtgacgttgcgttaaccaaagttgatgaagaaacgaagcaaacgctagctggcgcggagtttgcattagagaaaaaagcaggcgacaattgggagacaatcgaggaagggcttgtgacgaacgaagacggccaacttgtattaaccgaattggaacctggtgactaccggtttgtcgaaacgaaagcgcctgtcggttatgaacttgacaaccagccaatcgaattcacgattgacgacaaacagacagaacgaattcttttaacaaaagacaatgtcatcatcaaaggcagcgctgttttgaaaaaagtcgacgcagccactggtgaaccacttgaaggcgtatcctttaagctcgtccaagacggaaagacaataaaagaggggcttgtcagtgacaaagatggcttcgtaaaagtaagcggccttcgtccaggatcctatgaactgatcgaaacgacagcgttagaaaattacaagctagacccaacgccgattccgtttgaaattgaagcgggccaagagaaagaactcactattggcgagaaagagaatgctcttgtcacaggcggcatacgtttgacaaaagtcgatggcgatgacaatcgccttgccctgcaaggagccgtgtttgcccttcttgatgaagacggcaatgtcttaagggaagggctagaaacagatgaatctggccagttgacgattgagcaactcgctcctggcaactaccagcttgtcgaaacgaaagcgcctgttgattatgaactcgatgacacgccaattccttttacaatcgagaaaagccaacaggaaacgattcaagttgaaagaaaggtcgaaaaccacttaatcacgggagcagtcgaactgaaaaaacaagatagcaaagacggctcagctttagaaggagcggagttctccctctatacagaagacggtgaacttgtggaagaaggccttgttaccggtgagaacgggacagtgtatgttgaaggcttgaagccaggcaagtattactttgtcgagacacaagcacctgcccattaccaagctgatgatacaaagcgtccttttacaattgaacggagccagcttgaaaaagtagagctcatcgtcgaaaacgtactcatcccaggtgcggccacattaatcaaagtcgacgaagacagtgaaaacgtccgtctagagggggccgtttataccctggaagatgaagagggaacggtcattgaagaagggttaaccacggatgaagaagggcgaattgtcgtcactgacttgcctcctggcgtttactattttattgaaacgaaagcgcctgagcattatcagttagacaatacgccaatcaaaattgagattgaaaagggccaacaagaggccgttcaagtcaaagcggttaatacactcacaacaggcagcgttgtgcttgaaaagcatgacagcgaaagcaatgcgctgttagaaggggcggagttctcgcttgttgacgaaaatggcaatacggtcaaagagggactcacgacagacgcaaacggccgcattgtcgttgaaggattaaaaccaggcaaatatgcatttgtggaaacaaaagcgcctgccgattatcagttagacgaaaagccaatcccgttcgagattgttcgcagccaaaaagaagcactcgttgtggaaaagagcaacacgttaattccaggtgccgttgaattgctgaaagtcaatcaacatgatacagccgagacattagcgggtgctgaatttacgttgcttgatggcgaagggaatgttttagaagaagggctaactacagacgaagaaggcaagctgcgcgttgaacaacttgccccaggcacgtaccagtttatcgaaacgaaagcgccacaaggctttgaattgtcaagtgaaccgttgccgtttgtgattgaacggagccagcaagaaacgctaaaagttactgcgttcaacgaattaattcgcggcaaagtcgagttgagtaaggttgacagcgataatcaaacaatcgccttaaaaggggccgagtttgaactgcggacgaaagcaggcgagtttgttgctttgtttacaaccaatgatgaaggcaaactgttaataaacggcattttgccaggggactatgtgctcgtcgaaacgaaagcaccttttggctatcaacttgatgccacaccaatcaatgtaacagttgaacgtgaccaaaaaacagccgttttggtcacaaaagaaaacacgcttattcctggttcggtcattgtggaaaaagttgacgcagctgaccaacaattgctattagcagcagcggtgtttagccttttggatgaagcagggaatgtgttggaagagaaccttatgactgaccaacatggaagactggaaatcaacaacctgccgccaggcgactatcaacttgtcgaaacaaaagcgcctgagcactatcagttagatgccacgccgattgtgttcacgattgagaaaggccagactgttacgccagtcataacggttgaaaacacgcttatccctagggcagcggcattgattaaagtggaccaagacaatggcgatatccgccttgctggtgcggaatttatgctgactgatgcagacggaaatgtggtagcagaacaactggtgacagatgaaaatgggctcgttgccgttagcgatctagcaccaggcacctattatttcgtggaaacgaaagcgccgctccattacgaacgtgacgcagaaccagtagcggttacagtagaaaaagggcaaacggaagcagcggttgtcaagaaaagcaatacgttgatttcaggggctgttgtactcgagaaagtcgatagcagcgaccattctacgttgcttgcaggagcagagttccgcctcgaagacgaacaaggaactgtgatccaagaaaaactggtaacggatgaaacaggacggattattgtcaccgacttaaaaccaggcaactatcaattcgtagaaacaaaagcgccaaatggctacgatttaaatgaggaagggctagcctttacgattgaacggagccaagaggctgctgttgtcgtcaaagctgaaaacacgctcacgccaggaagcgtcgaaattgtgaaggttgacagcagcgatggcgcacgtttggaaggagccgtctttaccgtgctaacagaggatggcgacatggttgcagaagggctgacaaccgatgaatcaggcagcgtacagcttgatgggttagcgccaggcacgtaccaacttgttgaaacaaaggcgccagctcactaccagctaaacgaaacgccgattgcgtttgaaattagcaagggccaaacagagcggcttgtactaacagttgaaaatactctcatcccaccaggtgaggaaccaaaagaaccacaaccgcctagcgagccaaagcagccactgacagaaccaggcgatggtcaaacgccaactgggccacaaaacaataacggcggcacaggaacaggcaagacagggacaccaaaagcaggtggcggtgatccaagtccgctgctttcaaaaggagcacagcctgcttcagggggacaattgccgcaaacaggcgaaaccgaaatgttcatgtttatggttgccggattgttgctgatggcgattggcgctcttacactagtgaacggacgtttggcaagaaaaaggggatagaaagaaggggcatttcttgcgaaaaaggacactttttataggaatgttgctcatcattgcgggattggcgcttgtcgctgtcccgctaacaaaagagtggcagcaggcaaatggagtggctcaactggaaaaagcgctagccgctgtccaaacgggagaaacgattgaaaagacggatgattcaccatcctcttggacaaaagaacagttagaggcagtaatggaactggaaatccctgcaattgacttaaagcagtatatacttgatgaaaccacggatgaaaacttggccttaacgctaacgcaaataaagcaagaacaagtgccaggagaaggaaacttcgcggtcgcgggccatcgtggctaccgaggcgacaggcatttccggcaattgccaaatgtgcaaaaaggtgatgaaattcgccttcatgccgatgacggcaaaacgtatatttatgtggtcaagagcacggaaattatcgaaccaactgatgtagatgtgttaaacgatggagagcagccggaaattacattaattacgtgtacgctgtctggccagcagcgtgtagcggtgaaaggcgatttgattgatgtgattgaagcgtagagaaagaatcaaacagacgagcgacggttagtgccaaccgtcgctcgtcttatttttttaattcacgtttcaaatagcgaatgccgagaataagaaaataaccaccaagcccaaagaagccgaacaaaaacacgattgcaaaaatctgataaagggctgttccgattgaaaattggtccaatggtagacttcctttcctattattttaagaagcagcgaacagacaggcgttgatcctggaaacgcgttagcctgctcattgctgatgaacgagctgttaagcgcttttatccgtactggatcagcattaatggccttttttctttttaagcctgcgaaataattcgagctgttcacctaaaaattctttttcttcctcatctaaattcgtaaacgtataagcagagccgttttcttttactttgtcggacggggcagttttgatatctgtctctcccgcaatatacgcaatggaaacattatatttctcggcgagctgctttaatttggcaatcgaaggttcgttgcggccttgttcgtaaaaaccgtatgcactttccgtaatgccaaggaacgaagcgacttcttgttgcgttagctggtgagctttccgcagctctcgtaagcggtcattcagttcagccataaacaaatccttcctatttgttattgtcacaattatacaactaaaagttgggtaaaggaacaaaacgaacatgaacactctgtaaaattgggtaaaacacttgactccctaatttacgttggctaaactgactataaatgggagcgccttcctacataactccatgacttgcacgtgctattaagggcattcggtacggccactgccgtgtatcctcttacgaattgaaggcgcctcattttgaaaagactgattttattgacaaggaggtgaagaagtggcggatatcccctacagcgtctgttcctgtttatacacgggcatccaaaaaagcattgcttttctgacaatgcaagccaatgccgtgcaagcatcaaaggagtgtgtatggaaaaggtatgacgaccagctgtatcacgaagtaaaagaagcgttgcaatggcaccgccaacattgtatggctgatacgagccatttagaagaagcgttgcgtgtttttgaaaacgcctataaccaagtacatgataaataggagcagacgtctttctctgtaaggtcgttatggtacgactgcgtattaataaaaacggtaccattaacagctagcaaaagtggcgattgccacagaagccccacttcaagcaatccggctgagcaagcagtgggtcgttcacgtgtgaaaaaggggttgactatgaaagatgcatatctcattttagcggttgtaggatgggtgctgtccggatggtatgggaccagtcgggggaaaccaacatagcgaagaagaatacctagatatagagtcgcttgaagagcgcgctctgctgttggcttttactatcgaagcgctgtctgctaaaacgatataggaacaccaaataaacgcaagcgtcgcagcgattgagacgtttgcgttttgctatccatttcatgttctcatcaaaaaagaaagaaaccagacagcgtgtggctgctcatccgctgcggctctgcgaaaagcctcttggacaatttgctgagaagctcggtcagctgcttttaggtagaaatccactgtattttgttcatcgttgaatgcaaatgttaacccatcccgatagtgggctgggcattcctccgttatctgtggtcttggctgtctgttcgtcaactgtatggcagaaacgcggataggtgtctgtctttgtttgttactcttgtttctggtgtgtagcgtacgcaattagggggagacaggagcaagagcgggcttgaaaaagggaaatggtcccgtgctagcaaagtttgcgctaacgatcgatcgaggaatacgggtgggagcgggtaaaaagaaagggagctgaccaataagtcagctcaattacagtaggccatcttatctataccatcaggctaaataggttagcttctcactgcttaaagaaacaaagcaataatcaacaagagagagaaaagcagaaaggcgccatttaaaacgagcccaatgattttgacagatggtttagcagctttaaacgcgaacaagactccaacaatagagaggaacgtccataagccaatcgtatatgtcggttcaaattgaaaaagagtgctcacataatacaaaataacgtttaaacaaaacaggataatggctatcatcaatcttcactactttcctttaaaagtctacgtgctcttttagttgatcaactcgggggattctttcttatataattggcgatcgacaagttcacgataaaattggtgatgctcgattaattcatcgtgtgttccttcgcctgttatttccccgctttggacaacaaccaatttgtctgcatgctgcacggtcgacaatcgatgggcgattactagcgttgtcctagagagcatgagttgattgagcgcttcttgtactaaaaattccgaatggctgtctagatgggcggtggcctcgtctaacagtaaaatttgcggatttcgcaaaatggctcgagcgatcgcaagtctttgtctttgcccaccagatactaaaatgcctctttcgcccacttccgtttctaagccgtttggcaaagaggtaataaacgaagtcaaatttgctttttctaaagctgcgtgaatgtcggcatcgctgcttttttcagcatgcccataagtaaggttgtagcgaatcgtccccgccattagcggagaatcttgggcgacataggcgatcttttgtctccactcctggacatcaaagtcattgattggttggttgtcgtactctatcgtcccttcgcttggtggataaaatcgttctattaatgagaataaggtggttttacctgcaccgctagggccgacaatcgccgttacttcactggcattggcggaaaagcttacatttttcaggatttggctgccattcggataagagaaagacacattggaaaatcgaatgccatttacgcgggcaactgtttcttgattgtgcggataagatacactggccgctaattgagattccaaattctcctccataatataggtgatccgttctgtggcgccttttgctttttgcaactgcgtaaaaaagtggcccatttgtgagattggagggatgatttggaacatgtaaaaaacaatcgcaactaatgtgccggccgataaagtgccattggccacttgtatgcctccgtaaccaaaaacgacgactaataccaacaaggtaatggttgtcatcaatggagaaatgatggccattatttttccggtgtccaatccatgttttaacagttgatcgattctgttgttgccttgagatgtttccgggtcttctgctatagaagatttgactaatctaatatctgacaacacacgccctaaatccccttgaaatgatgctgtctcatcttgtaatgccttcgacactttgtatgtttttctacctagtggttttaatacagctagcgacacagggacaattaacaataagagcagcgtgatgctccaatttaatgcaaacagaattataatcgaaccaattattttaatggttccagataaaaaaggaatcaattgatcggtaaaaaaatttttaataacatttgtgtcatgagtaattctgctcattgtttctccggagctgttctggtcataaaatgagactggcaatcgtaacactttgtgccatagatctttgcgtaattttgccaccatgatctgaccaatgtagatcatcatatacatggagatgcctgacagaataatttgtacgataaagacgcctgcgattagggcagctgttgtaccactgaaatttgattcaacagttatgtccacgagattcattgttaataaggggacagcaagagaaagcgctgtttccatcaggactaaaaacaaagctagcccaagtagccacagtgaagggcggtaaaggcgcattagagaaatgaactcttttaattgaatcggtcgttcagttgtagaccccatatgattcttccttcctggtcgaaagtttgtctgatagcagtttcttgaaaggcaaattgtttgtaaagcttgcaaaaaaatgcgcttcctcgtagtgctttaaaatgtttttgaagggaacaccttttttttctaaacatagccctttataataaagaaattgcccgacatatgccgtacaagcataattcctagataattgcagaccttgtcctatatcttttaaagcagcatcatagtggtggtagttcagttcaatgattgttttttggtacaaaatatagatttttaagttttttttgtgcaaataggtgttttttcctttaattccttcaaccgatgcaaggcttttttgtaaatagtctaacgtttcgctatatgaatatgttttcatgtgggaatggataatgcctaaatataaatgaaactttgtttgaatagactgttcaaatggcaaacagcccgccatgcattttaatttcatccatgtggtttgagcatcctttttcctgcattgatattcggagaacagatgatggatccttatataatctttaaaccaattagggaattccaccgcctggccacagtcaattaattgtgcagttagcctgttcagttcctcgtactcttcatgtaaagacagttgttcaatcatttcataagtggtttcgatgtattcaccattgtaggacgtgctgagcgttaaaaaatggtcgacaggcacccctagtttagaagcaatggcttcaagcacgattatgtttggaatgtacttcccattttcaattttgcttattgctgattggctgacaacgctagagctaatattttcttgcgacatgcctagtttcatccttaagtttcggatctccatgccaattcgattatccatcatatgcatcttccttatcataacctgtattagttggtttttttaagtgaggatggttatcgaaagattatcaggcgtttatcagaaatatatcagatcgaccaaatttcaacatgtattttccaaaaaaataggggctatagtagtgagtttttcaaaaaacaaacaaagttattctaattgtcataatttataagagatactgtaaaaaaacaggctcaacatcgacatggatcatttttagccaattaatgactgaaaacgatatttccattttgctaaaatgttttttacagttaatttgtgccggggattcctggcaaaaaaaataggggaggaattataaaatggaaaaagcttttgacttggatttggaagtagtacacacgaaagcgaaggatgtacaaccagatttcacaagcgtcagtttctgtactcctggttgcggggaaacgggtagctttaatagcttctgctgctaagaacaaagacttttgattatttacatgggattgcccctcaaaaatcttgtatttttccaaaatacagatttataaacttgagcaagggcaatcctgtttgtttttcatttgaaaggggcgttcatagcgatgagaaaaagcgaacaattattatatgagcctgtagacacaatcatgttgagagcaccgattttgtcattatcgcatgaccatcaaaacgcgtccaaagacgatattatccctattttaaaagaatacatagaacggcctgaaataaaagaagcactagcggttgccagccctaatttatttcagtctttagataaaattcatggcgatccccgttccaaaaaaacgaggaacgctgtttccagcttgttaaagtttttaataaggatgtctagccggccaactccttttggtttgttttcaggcattgctattggtgaacttggcaataagacagtgggatctttattagacacgaagcaacaccaaaagagagcacgtccagatatggagtggttgcttggagtagtcagcaaaatagaaaaaaaccaaacgatcgctaaaaagcttaacgttgtttttaatgatgctgtgtatcagacggacgatcgagtctaccttcattatttttctaactgtggacagttacgaagcagtgaaaaccaagagcgaaaagacaatatctcgatcagaaaaacagtggtggtggagtttgtccaatcggtagcgaaaaagccgatttcgatctctgaattaatcaatcagcttcaattaacatatacgagcgcctctataaatgaaattgaatcgtttgtatggaatttattccaacaagaatttcttatcagtgaattaaggccgccaatcgttaactgtgcgcctttatcctatgtcatacaaatccttgaatccatccctgaagcgacggaaataggggcgatgttaaaaggaattgaagccgatatcgaaacgtataaccaattgcctatagggcagggattagatttctttcaaacgctaacggctaaaatgcaagacattcatcctagcaaacagccgttgcaagtggacttgcgcttaacatgcgcagaaaaggttaggataaatcggtcaattggcgaacaagtggccaatgcggcagagtggctgtggaggctttcaaaaaatgagactggagtcgcccatttaagggagtaccatgttgaatttcttgagaaatatggggtaaatcgagaaattcctctgctagatttgttaagcgatgagaaaggtttaggggcgccgccaacgtataaatacccgccttcagcaaaaagtgtcaacccgcctcaaatgaagagcactcatcgtttgttaatggaaaaatacatccagtgtttaagggaaaatgcaaaagaaataacattgaccgaatctgacctgcaaaagctaatggataacgacacagatgacgtttttgctcccaattccggggaattatttgttgaagtgcttgcttcatcagcagaggaagttgataaaggaaactatcagttggcaataggaaccaatgtgggctcccaagagctagggcaaacattcggccgtttctcggatatgattgctagcgaagagaatagaaatttgatggaagaacaaaagaaaatagaggaaacatgtacggacgttgaaaccgaatacgtagagttgagttttctgccccaaagtggccgtgcaagcaacgtttctattacgcattccacacggaatttacatacgactattgccaccaatgcaaacggccaaaacaaaaaattgttgttagaagatattttggttggggcgacactcgggaggttttatttaaaatcgaagaagtcgaataaacgtctcgtatttacgtcaaataacatgtttaattacgagagtgcaccaaattgttttcggtttttaagggaggtttctttagaagatggaaaggcgattcaagggttgaatttgggaagccttagagagttcgcttttattcctagaattacgtctggaaaagtcattctttcaccggcaatttggaaaataaacgatcaaatagaagaattatctgatttttctatgccacttgaagaatggatagagcaattttcaacatggatgaaaaaaatgcaggtaccagaacgggtctttatggcttatggggataaccgattgtacatccacttaaagaatgacaaccatttgcaggaattaaggtcggaactacggcgcagaggacgggtacagttacaagaaatcatcggcggttatcgggagaagcagtgggtaaaaagccctttaggcagacataatgctgaatttattgttcctttcaagaaaaggcctcatgtgcccgcaaaaccaacggtgatgattaagccagttgcagaagtgccaattgaatgcagggaaaaagaaccggggacggactggctttattttaagctttacgggcctacccacaaacagcaaaaactgatttctacacaaattccaacgcttgtagccgagttagagaatcacaaacttataaatagctggttctttattcgctattatgacagcgagccccatctgcggctaaggtttcacggagatccgaaaaccttgttggctggtgcactgccggtatttcaaaaatggtatgcagcccagcgccttgcggggaacgttaaaaaagttgtaattgagccatatgaacgggaaattgaacgatacggcggcctttcgcttatgcctctaatggagcgatactttgaaaaagacagtttgttgacatcaaatttgcttggattgagtagtaagcaagcactgaaagaaccgctagaattaatcgcatccatgtatgttgtttattttctaacggagtacggttggcaccatgagaggcaattggagtggatttccaagtggagtgaggatccagcttactccaaggagtttaggccttatcggaatgatgtgcttaaatggctagatcaagaagaaaactggaaggctctaaaggagcagaaaggctttctctttaagctgttttctaaaaacgaagcaatcatacacgagctatcccataatatggagaaaacgccgatgaccaatacagaggaaagagttgtcgggagcttgatccatatgcattgcaaccgcttgctcggcacagaccgtgatagggagaaaaaagcaatggcgtttgtgcgccaaattattgaaagtcaaaagcattggaacaaaacgaaagggcgaccattaaacgtatgaggtgatccaccgtgatagagaaggtagttgatgaccaagaaaaacaagaaacgaaacgaattattgcccgtttgaccgagaaactaaacgatccacaaaaagtggaagagattgtaatggataagaacaatgtcacgacgattagcaaagtaaatccgtgggaccctgtttctttatctcatggttttgcaggaacgattttattcttctctgaattgcataaaatgtatcctgaagagaagtgggatcatgtggcccataatcatattgtctacgctagcaactatctaaaaaatggggtccattctatctctttatttggtggaattacaggatttgcttttgctgtgttcaatgcatctgaaaatggtacaagataccagaacttattgacaaaactggatgaagtgattcgtagggtagcagagaatgagatcgaagaagaaaaacaaaggaatggtctcggcgctctaccaactttttatgatgtgatccaaggatattctggaattggaaggtatttgcttgaaagaagaaaggatacgccagcttttaacggcttaattgaagcgattttgcgccggtttgttgaaatgactgccaccataacatgggaagagcatgaggttccaggatggtatgttacgcaagagaatcaatttttagagaaggataaaaagatttatccatttggcaacttcaatttgggccttgcccatggcatcccagggccgttaagttttttatctttatgtctattaaaagggatcgagataccagggcaaaggcaagcaataaccacgattggcaattggctcgtccgtcatgcgaaaagcaattcaactggtgccccagtttgggcccatcgcgtaggtgtgaaagaagctatagtgaacaaatataccgttatagatgaacgggaaggctggtgttatggcaatcctggtgttgcccggtcgctctatttagcaggaaaagcgctgaacgatcttccctatcaggaaatggcggttaagtgtttccacggtattaaggaaaaaacattagaagaactagacttgcaaagtgcgacgttttgccacggaaagagtggtttgctgcaaatcatggtacggatgaaaaacgatcttaacatcaatgattttgacaagctcatcaatcaattggaaaacgggattaaggaacaatatagggatcagcatccgttgggatttaaagattttgaaatcggaagccgaacaaacgagttagataaagcgggcttattggaaggggcagctggcgttggattggccttattgtcgaggaccggtgacgacagtgatctcttctgggataaagcgtttttaatcagttaggggtgaggatgtgccggaaaaggaagaaaaaaacatactagtcggaatttctggatcgatctctgtcataaacatgccctcctatttagctttttttaaacatacgtatggtcatgtcaaggtcatcatcacagagcaagccaataagttgtttcctgcttcctctttgtcgttgttttgtgatgacatttttcaggatcacaatgaaacgatagatccaaatacggccagccatgtcgggttagctaggtgggcagatctatttattgtccttcccgctacggcaaataaaatcggccaagttgctaatggcttaggcatggatcttctgtcatcaaccatattggcttctacgaagcctgtgctcttttgcccaaacatgaatgaggcgatgtggaacaatttttttgtaaaaagaaatatggcgttgattaaagagggaggacatattatcatccccccagtggaaaaagaagcatatgaagtggcttcgggaagcattcgaaaaaactttattattccagatatgtataccatcgctcaagagatagataaagccatggctgtagaagaaaaaagctaggatgccgtacggtacgtcctagcttttttgttgttttggcggatgttgaatttgatttttttctgatagggaaaagggataatcatttttagaaaaaggagtgatagccgatggaaaagatcattgaaacaaagaatttaacaaaaaaaataaaaggaaaaccgttagtggaagaaatcaacctttccatcgccaagggagagatctgtggtcttatcggtcctaatggtgcagggaaaacgacgattatgaagctgttgacgggattgctcatccctacaagcggagaagtgaaactgaatcaatggaatgtgcataagcagcgaaaggaagcgatgcgttctgttggcgccattattgagtcgcccattttctttgaattcatgacgggtcgcggaatgctcttaaaccttgccagactccatgggttgaacaaacaggagcgacaggataaagtcgcagaagcattgacgattgttggtctagatggccgcggcgatgaaaaaatacggacgtactctttaggaatgaagcaacgtttagggatcgctcaggcgctgttaggcaatccagagattgtcatattggatgagcctgccaacggcctggatccgatggggatgagggaattgagggaattgattttgcaattaaataaagaaaaaaatattacgttcttgatatcaagccacttgctcgacgaactccaaaagatatgcagcacgctcgttattattaagcagggaaatgtccttttttatggaaaacaagaagagatttatgacaaggcagagaataatttagaagatatttttatcgggatgatgtcataatgggacagctaatcattagtgaatttgaacggttatggtcgagatggtccattcggctgctagtattggccttgccgctattagtcattgttactggtgtttatttccaaaaccacaatcaaaacaggtcaatggatgctgttgattacgcaaccgctttaaattttcctattctcagcatatcagagcatttgtttattacgttcaacattctgctcatttttatttgtgcctatgtgataaccgaggaatatcaacaaaaacaaatcaaattaatagtgcttcgtgcttattccatgagccaaatttttctgtccaaattcattgtgatggcaacttctttatttatttgtttctttctttattatttggcttccttctccattgggctgatcatgtttgagatgcctgaaaggtcgattctttttgtttctgaagcagacgttacaaatacggagatggttcgttatgcattgaactattatggcattgcctttcttactagtcttgcggcgctctcgttattttgctttatcgcgattttaatgccctctgtcaatgctttattaggaagcggcatttgcattcttttcttttcgattgttggtccgcagctgttagagcaatcaaccgcttttgccgaagggagcaatatatcttatgtggtgtacgcctccataacaaaaattcaatacaccggtatctcgttattgctttcaggcggggaattgagcggttggctaatagccgttacttcgttttatttgttggtctttcttgggggcgcgtatttggtttttactcgccgaaattattatgtgtaaaggagccgtatgatgaaacatttaatcataagtgaattggagcggctttggaagatgagaatgatgaaaatcctcttgttgctgctcgtaggcatctcctttttttccgcttactttttgacttggttcgatctaggtctttatactgcagatagtgaaacgccgttaaatgctgttaacttttcctggtttttgttaagggaagtctctttctttgtaacactagtcatcatgccgttgttttgcgtggttgttttgaactcaccaataaaagcaaaaacgtacaacttagtgttgtaccgtccatttcaccgtttagagtttttactgtctaaatggggaacgctgcttctgattgctgtcttcatcaccgtgtttatttggctcattggtgtcatgttaggctttttcttttaccaagttccagaatacgtgactttttatggtgaccttacacgctattccatactgaatggatacatttattcagctaagctctattttttgttttgggctgtcattgccgctggaattgctattgccagtgtgatgtcgattatggcaccaaacccgattattgcttacttcttattaatgattgcctatgtggtgccaatttatttttcaaatgagctgacatttttgttgatgcccactcaatccatttttatttcgctttcggaaacgaacatgccattgctttacatggcgttgccgttaattgttctgtttggcggagggatttcaagtttattatgggtaaagcaagattttaaataaatgttttgtgaggggataaaatggagcacattctgattgtcgatgatgaaattcaaattacttcaattgtgggagagctgttacaggaagaaggctaccaaacaacagtcgcaaatgacggaatgaacgcgataaagctgattaaggagcaggattttgacttaatcatcctcgatatcatgatgccttatgtgaacgggttagatgtttgccgtagcgtaagggaatttaccgatgttccgattttatttgttaccgctcgaacaagtatgaacgaccaaattaatgggctaaacatagggggagatgactacataaacaaaccgtttacccatgaacagctacttgctagaatcaaaactcatttaaggcgggaaaaacggaagcaacaacctacagatgaactcgtctatggaaaaataaaactcgaccggcggacaaatgagctccgctatggcgaaaccccattgttgctcacaaacaaagaatttaaaattatggaaatgttaatgagcaacccaaggcaaattttttcgaaagatcatctatacgagacgatttggggagtagaagcaactggacaatcacacacggtgacagaacatatccgaaatattcggatacgcattcataaaattgatccaatggcaaatctgatccatactgtgtggggagtgggctataaacttgaataaaaaaagaacgtccattaaacagcaaatccgattaacaatagccaagacgattttattaagtttcttcgctaccatcattgtcgttttggcaagttgggcgattgtcatgagcatcgatgaccgctattatgccaattactatgagagccaagtccccaaaataaccgatcaagtacaaagcttgaatcgtgagcttgtcaattcgcaagcgtcgggggccaaacaattagaagagatcattcccaccccaggcatggaataccaagtgctggacgaacaaggaacattcttgtacggttcattttccgctaacgtcaacccagaaggcgtccatttgttaaacaaggtcaacaaatcgtttttggaagagaacaccgccacatcgtttattccgattgtcgaccaaaatggtacatttgctggcagtgtcgtacttcaatataaactggaatcggaagttgaagccttatttaatattttttttgtttgtctattcctcacgccatttttctttattatgatctttacctattattatgcgagcaaactaggaaaaaactattacgcaaggattcaaaaattgattgtcgccacagaattggtccgaaagcaaaatttagattttgaaatcgaggctgacggaaacgatgaaatcacaaaactttcgacttcattcaatataatgaaacaagcgttgcaagacgctctttaccagcaatggaacttggaaaaaaaccgttccgagtttatttcgtctgtctcccatgacttaaaaacgccattgacgatcatgaaagcaaacgcgcaaatgttggagagaaagataaaagatgagcagcataaaacgtatattgcgaatatgatcggcgaaattgagaggacggaaaaactcgtacaagagcttggtactaaaatgaacgacgaagagtctttttttgccattgaaacaaaaaccgtcgaaccaggtcatttttttaaaactgaatttgcaaagtacaaagattttgttcaaaacgaaggactgacgtttcacacttccgttctcgactacagaaaaacagcgaacacgattcagatagatgtgcaaaaaataacgcaagtgatagacaacctcatatcaaacagcttacgtttcgccgaaccatatgatgggcatattgattgtcacgcagaatgccatgacgattacgtaaaagtgactgtaagcgacaatggaaaaggcttcactgaatcagacttgcattacgtctttcaaaaattttaccagaataacgatagtgctgaccctcataaaggacttgggctttacatcgtcaaacacataatcgaaaaacatggcggaaacgttcaagcatggaatgacaaaggcgcagtggtttcctttcagttacctgctatcccgaaaaacagccactagcattttgcgctagtggcattaaatttcagtggttttaatcaaagcacacaattccttggttttcaatcgcttcggcacgggcatcgccaattcctttaattcgtttcatatcattataagaggaaaagggccggagttgaataatttgtgcggctcgatctggaccaatttcataaatcgcttgcagctcagactcggaagcactgttgattttcaccgttccaggcccacaactattggtacttgcgctttctgaagactgtgcagtctctgtttctgtggtagcggtttcatttccgttattagtcgaggcgctggccacttcttcttccaacttcgagatagtcgtttccttctcttcaatcgtttgctctttttctttgattttatcgtctaatgcagcaagcttgtcctcataatcttcactaatttcagcagtgatgcgttcttccagttcttcctcgatctgttcccgaaattcctcttcccattcaagttttgcttcctctaattgctcttcaaaagaaccgtcaacgtcgccttcttccgcctgtgcgagcgccaactgctcttcagactcttttaatgattcctcagctttctctaacgcaacagtcaattcttccatttccgtttctttgtcttgtaaggatgcttctaaggtttcgatttttgcttgcgaacgatctagttgggcggactgggccgtttcggccggaagtgtgttgccaaataaaaatgcggtaatgataaatgctggaatgccgtacgcaaaaacgcgctttctagttggaaagcgaaccagagcaggcttgattagccctaaaatgagaccgaaaaaagtaagcaataaaaataatagaaataacgtattcaagctagttcctcctttgtggtgtaatatggtaattgtaacaaactatcagactatcgtcatgggttaatttgcgtaggggaggagttgatttgttatgagttcttatataagggacgcgcacctatgatgcacagccatgttctaatcaaaataagcattgtgtgaaacgattgataggtgtactttttttaaggacggtgtgttgatatgaaagattttctttcgagcgcttttcttatttgtggttggctttgtatggctattagtgcctatctactgttttggacagtggtaactcccttatgggccatcatcccttttctcgttttcattagtatgggcctgttatgtcttcgtatttctaaaaaactaaataatagaagacaatgaacgtgcaatagtgaaagatctaaggtagctagaaaaacactagtgccgagtctctcataactaccttaatcaattggtataactactggtaacgtttactgatttgaagtaaactaatggaaaagacctgtgtaagaagtcgtttttttattaaatatctcagctgattgtctggtaagtagagcatgtaatgccaaagcttgaattcaaggatataccaaacagaaacaaggagaactgcgatgcaaggaactgaccgtactgtgatgatgcattttcctaatagtcaacaagcatcttcattaaaaatcatccaagaaccaactagtcaaattcgttcgttttattttaaaaagagtttgttggcacaagtggaagaacttgagtatgcaaacaactacgctatttattttctattttctgatttagaaaatcctagtgtgtacattggtcaatcaacccaaggaattaaacgactgagagaccatttacgagaaaaagatttttggcaatatggcatcttatttgtaactgataataacagctttgataagctggccattgattttttagaacaccaatttattcaactgtttaaacgctcatcctttattgttgaaaaccgtgacctacgtaatacaaagccgacaattaattggtttgcccacgcaaccatgaatacatttacgaatcaaatcacatttcttcttgaagcgcttggcgtttctattcaagaagaagagaaagaaaacgatcgaaaaatttttcctgctgaaggagaaagagaggcttctttatacatacatgatggccagtttttcttaacaaaaggatcaatccttcatcgtccacaggaacgtctgaagaactggaatgatgaagggaaactttattacaagctgaatgcgcggattgaccagctaattgatgtaaagcaagcagaagtgattgacgaaggcacagttcgtcttcttcaggatgtcgtctgctcaagccctagtgcagcagcagatttatgcagtgggacttctaagaatgggtggacgttttggaggggacttgaggaggaagggaagaattttggtaggtagttataaatttcgtaatgaaaataaaaaattatggaagagggaagaggatgaaattaactaaacatgatttttattttggatctttattatcattacttgtcaaaagtggatttgcaccggcgattattgacggtggagagctaagtagaatttattccttatcactggatcaaggtgacattaaagtctatgcaaaatattcttcaaaaccttgtaatgaaaaaaaagaagagcaaaggtgggattatcattttagtaaagaggaagtaaataaaatagaaggattaatcaaagataactcattaatttttgctctaatctgtgggcaagaacgtttaaaaaatagtgaaataactttcttagatatagatcaactaaaagaatgcttaggctcggcatatcgtgaatcaaatcggcgtgtatcgataaaggtggataaaaggggacgaagtttttatgcttatggttcaggtttagatggggtagaaaaacctattaaaatcaaaagaaatgcgaaagagaggcttaaggagttctttccaaacctagataattttcaaatcaaagaacaattaagccaaaaaagaatagaggtataatctcaccgaatcaatatctgaaataattacatgaaaatacagaaattattttttcggacactttttggggcggaaaagacaccgtataaaggggcgattgctatgcaacgtaagtgatagcatctacttaaacctcaatatctcattcatatcatcaatatccaacgcatcagcaattttctcaatatgttcaagttgaattcgttcgcgcttcccgcttgccatttcgctgagcgtggcgcggcggattcctgtttttaaatggagggcgtgaatggttaattgatgtttatgtagcaaatcgtttattgcaatttcaactttacgcataaggatcaccttctattaataagtacttgctgtacttataagcgtacggtatactatttccaaaagttgtacgcttatacgtacggatttgaggtgatcccatgcaatcccgccaacagctcattcccgacctcctcacagaagctgcttatcgaatggaaacgactttcaaagcaaccagtccaaacatttgcaccacgattacatacaacgctcaaaaatccaacatatacgccttgctccagcaacgaattcatgctgactatccaacagacattctctgtttcccacaccaagacattcccatcaacagcaagcatctaatttggctcatatcccttcatccatgccagcatgagctaccacaacagccagacgtttatgtcctatcgatagcactcgcccgaagcagggaactttattgttcctatatttatgatgtttcacggaaaaagctatactacgcgataaagggaggcggtgctttcctaaatgaacagcggttgcgacgggaggaaatcatgccgttaaatgaagcggttttgcggattaaagcagactatctccacgaaagcaataaaagggttccggcaaataagagggtaggtgtggctgatcagtcaacggctttggaaatttgccgcgttgcagaagggaaaaccgatctgtttatggctatgagcgaatctccccatgcgtttgcagcggcaagtctcatcgcagaagaagcgggagtaaggttaatgacggtggaaggcaagcccttgcgttggtacaaagaaagcagcttttgggttggggtgatttaaatgagttacacacttaaagatcctctacatgccaaacttgatatattgaattaaagacgtaggaggaatgaagtgtgtcgtgttacataaagtggatcatttaaaaagagaactcgatgcacgccgccctcttccaatggcaactgtccaatcattgaagaaagattttttagtgcgaaatacgtatcactccaatgcgattgaaggaaatacattaactatttttgagacaaaagctattttagaagacggcattgtggtaggtggcaaatcgttaagagaacatttagaagtaattaaccataaagaagctagtctttatatagaagaacatttagaggaagttgtgacagagcgtttcataaaagagattcatgcccttgttcttagcggaattgaccggcaggcagccggtgcctatcgaaaaagaggaagtacggatagctggtgcgacccataatgtgacgtcaagccacctcattcaagatgagatggggcagttggtccaatggtataacgagagcaatcacttgcacccgatcgagagggcaagccgtttgcacagcaagtttgtcaatatccacccatttcgagatggcaatggaaggacagcacgcctgttattgaactttagtttattgtcagcaagttacttgcctgtttttgcttaaagtagaagaccgaatatcgtactatgaagcgcttgatttagaaggagccaagggggagtgcagaccttttattaagatggttgctgagttagaggaagcgagcctccagcagtatttggcgttgttcccatgagagtatgaaacagggttcgaaatatgcgaatggtcggcatgaacagatttttttgtttggtcattttttaatactgttgccaaccttacattttttatctcgcgtgtttttattttagaaggagagatttatatgtgtatgtttatatattacaattattgagttgttaatgtgtttttttgactacatttggggtagcctattttttaggagatcttggctgcttatttacttattttgttttaaggtccgtctatgcatacgttttctaccgctatcaacttacttgctcaaaataaacaaaaataacttgtaactgaatatcaggattttaacaagtctccctaatacgcggaaataacaatctattccaagtgttgtattaaaaaaataaaattgtaactaagggagttgacatttttttattcaaaaaataaaatggatttgtaaatggataaaagtagaataggaggaatatttaaggtggaatttaataagttagtaggtaaaggtttatttttaagtttagtattgtcattattattttgtttttcctttttttcaaatgtggcgaaagcggaagttggtaaacctgacaatgaattacatgagatagagtctaagcttagatctaatttcttgaatcttggtattgattctctcacctcagaaaaacttattcaaaaagtcttaaaaggtgaattattggactcgcaaaaacctgaactagttaattcaaagcttgaagaagttgaacttagtccagaaaatccaacagaaataattgaatttgaagatggttcaagagtagaattaacgattaaggatgaacctaatgaagaattaataactccattaggcgcagctacaggtacagtgggtgctagttgcaaatcgtcaggttcttatgcaaagtcttgtactctttctccaagatacagagatggtgtgtgggatattcggtttaaagcaaaagctgaaattgtacgtggcggaaatgatatgattcactctatatatggtaattatgtagacgctgttggttattcagttgagcacatgtcgttcaaaattacaaggaaaaaagagtctggaagtaatcgagcaaaagcagtttataaaaatagatttaatggtccatttggctcatatactgtagtaagagatttagcactttacgttggaaaggatacatattatgctaggttagagtggtaattctctaaagctaatatttatcgacatgaattgctcttatatagaaatatgagagcaattttctgtaaaaaggagaaagtatatcatgacgatattaatactaattgtactattgggctttttagtggatttttggaaggctagacaacaaagaaatgaaataataaaacagaacaaagagatgattgccttattaaaagaactaacgacgaagaaatgattcacactaaagtaggcgagtctttgtatgtatgtaaaagccattttgaaccataagctgcctgtttctcaccaagagatggaaagaacgattacggttacacgagactttgccgatcccaatcagagaatcatgatctacgttagatcaatttgaagtgttgaaagagaaacacttcacataccttgaaagtaaccagtgttttttaacttacggtttagaagcagatgcacaaagcatctgcttctcttaatctcattacgcactcaccctctctagaatcttcaccacattggtagccaaggaggttgcccatttgcctgcttgattcaactaccttcctgtaacatttcaatccaattccgacgtccgttttcttgataaggaatgccttggcgttctctaagatcggacattgctttatcgtaattataggaacgaatcactcaatttcagtgtgatacggttgttaaactaagccatcttgtcctctgtgtcataacgtatatggaggtgatgattagatggcaaataaactattggtatttgcagatactgggatcgatgatgcgatggcgattatttacgccttgcagcatccagacgtggaactggcgggcattgtaggtgattttggcaatgtaagccgcgatcaggcattgcgcaatgcatcgtatttgctaagtttggccgatcggaaaggggtcccggttattgctggagcgactcgagcgctaaatggagaagaaccggaattcttcccggatattcatggagaagaaggtcttgggccgattaggccgcccgttccagcagagcgttatgcgaatcgaaccaattttagccgcttgtttcaagtaattaaagagaatccaaatgaaataaccattgtcgttctcggccgttgcacgacgctggcaatggcttggatgattaaccctgccgttatgaaacgggtgaaagcaacgtttctcatgggaggcgcatttttagtgccgggaaatgagactgaattagcggaagccaattttttaggagatgccactgccgccaattttgtttgtgcacatgcgccaaatgtaaccattgtgccgttgaatgtgacgagggatgcgttgctaacgccagccgacgtcaatttgattgactctaaagcaacgacgccactgcttcgtactattaagccgatgcttgacttttattatgagtcttatcaagttctcgaacctggtattcagggaacgccgcagcatgatctaacagcattgatggcggcaatggaggtcccgaatttgttaagctataaacggcgcaacgttcaggttgaagatcaaggccgctactcctctggactaagtgtcgctgattttcgccctgcctcagccgcatgcagtggaccttactgcccacgtatagctgttcaactagatttttctgtttttcgggcaaatgtgcttgatattttaacaagaagctatagcagcccgacaacaaatcgttgctaggcattacgcattcttctcttccaaaaatcaacgtccattgtgttgaaaaagtgtcacttacatcacaagctctgatcctttttcagctagagatgctttcttatagagagggaagggatgcaaatgctgttcgatcaattaaaaggtttgagattgataggggcgttgtaaattgaagtagaaaacagttagagacacggtcgaggagatccgagctgacttgaactcttttttcaaccttccttgcagccgcatctcctctcatgtttttatttcggtggacaagagcctttcgaaaatgagtcgcatcatttgaacaaacgatttgcccattccggagtctgaagcacttttacgtgaaaagggggaaaccgtttttgttttttagccttcagtagtcaattgtggataacgattaaatgaaagaaatagtcattgacaaacaagcacttccgtcatatattatctgtaaccggttacatgtgttaggagaatgagtatgacgacaattaaggatgttgcgaaatacgctaaggtttccgtggcgaccgtctcgcgcgtgttaaaccaaaaaggctatgtcagcaaagaagctgaacaggctgtgaagacagctattgaaacgttaaattataaaccaaacgctgtagcgcgtacactttatcataaaacatcaggaatgattgggttgcttgtccctgatatagcaaacccttttttccccgaacttgcccgagcgattgaagatgtggcactcaagaaaggctacacggttgtgctgtgcaatactgataacgagttaaaaaaagagcaacattatgtccacgcgcttcaacaaaagtatgtagacgggcttattttagcgactggcactgggacgtatgaacactatgagacacttgacttgcctgtagttgcgttggaccgttttgttagcgccaacattccgactgtcgtatctgaaaacaaaaatggggcaaaggctgctacggagcacttaattgaacaaggttgtgcatttatagctcatttgcgtggaccgaaaggcctgaatcctgctgatgagagatacgaagggtttaaggaagttgttgaagcaaatggaattgctcatatcatcgtggagacgggctttcaaatagagcaagcggaagaagccgttcgtgctttgcttgaaaaacacccgacaattgatggtatttttacaagcagtgatgtagcagcggctggagcgatgaaagcagctcatacattaaaacgctcgattccagaagacttacaaattgtaggctttgatggcattttatttggcaatatgttggtgccttcgttaacaacggtacaacagccgatatacgagatgggcgaactggcgatacaactattggtgcaactaatagaaaaaaggtctttgcagtcgtattggcatgaactgccgacgactttaaccatacgaggaacaacaaaaggaggtggtgcctagtggttaaacgaaaagtggctgtcattggtagcattaacatggatatggtgacgagtacggaccatgtgccagctcaaggagaaaccgtaatgggaaagggctttaaaacagtgcctggtggtaaaggggcaaatcaagctgtggctgcagctaggcttggtgctgacgtccgcatgatagggcgtgtgggcgatgatgcctttggcgagctgctaaagcaggggcttcaagatgaaggtgtttgtgtggatcatgtggaacccgttacacactgtagttccggagtagctacgattctgctttcagatggggataaccgaattattgtcacagctggagcaaatgaatatgtgaacgaagcatttttatccacatgtgaagaagtgattgcagacagtgatattgtgttgattcaattggaaattccgttaaaagcagttgagtatgcaattgccctttgtaagaaacatcaagtaccggtcattcttaatccagcgccagcacagaagttatcgcaacaaacgtatgagaatagtacatggattacgcctaatgagtcagagcaggcacagttgtttgcaaatacgaatgttcatttaaaagagaaactaattgttacccaaggtgctgctggtgtgatgtggacagagaatggggtggaacaacgtattactggtcatcgcgttatgccagtagatacaacaggtgcaggtgatacctttaacggcgcactggctgttgcgcttgcaagcggaaagccaatgcgagaggcggtgatgtacgctaatgcagcggcagcgttatcggtacagtcatttggcgctcagggcgggatgccgagtaaagaagaggtggctgcttttctgttggaaagacagtagtgtctttttgcaggaaggatcaacctatcaagcattcaggaggatcaaccatgaagaaattaggcatcttaaatcgtgatattgcccgggtgcttgcgtcgctagggcatacagaccaaatcgtcatagcagattgcggattaccaataccgtctggcgttgaatgcatcgacctttccattaagttaggtgtaccaaattttgctgatgttctaacagaagtattggccgatatggaagtggagtcaatgatggcagcaacagaagttagaacagaaagcccgtccattcatcaggaactggaaaacaggcaaatttcgcttcgttatttgcctcatgatgaattgaaagcggaaacaagtaaagcgaaagcaatcatccgtacaggcgaatgtgcaccatacgccaatgtcatcttacacgcaggggttattttctaatgaggaggtgtggctatgattgttgaaatgagccagataagcaagtcatttagtggaaaccacgtgttgaaaaatgtgtctttcacgcttgaaaaaggagaaattcacgcgttaatgggcgaaaatggtgctggtaagtctacccttatgaaaattttaacgggcatttatccaagggatgaaggggttgtccgtgtgaaagggaaggaggttgcctacacgcacccaaaagatgcggaaaaagacggaattgctgtcattcatcaagaactcaatattttgccagagctgtcagttgcagagaatttgtttcttggcaatgagtacaccgttggaaaaacgggttggcttaaaaccaaaaagatgaacgaatatgctgaacaacagctggccgagcttggtcttaaagtaaaagcttcggaccgggcaggtgctttatcagtcgggaagcagcaattgattgaaattgccaaagcccttatgacaaatgcagacattattattatggacgagccaacagcagcgctaacagaccgggagattgatacattgtttactgttattcgtggcttgcaggagaaaggcgtgactttcgtttatatatcccatcgaatggaagaaatcttctccttgtgccaacgtattacagtccttcgtgatggaaactatgtgagcacgaaagtcattgccgagacgagttttgatgagatcgtcaaattaatggtcggtcgagagcttggaggtcgctaccctgatcatgatttagaaccaggtgcggtaaaactcgccgtaaaaaatgtgagtagaaaaaatgaatttgaaagcgttacctttgaggtgcgggaaggtgaaatctttggtattgctggtttgatgggggcggggcgctcagaagtggtggaaagcatttttggctatcggcatgtgcatagtggcacgattgaaatcgatcaaaagccagttgtatttaaacgaccggttgatgcaattgagaatggcattgcctttgtgccagaagaccgaaaaacaaaaggacttatcgttaatttttcagttcgggacaatctctccataacgaacttagcaaccgtttcttcgggaagcatgatgtcttttacaaaagaacaggctctttatcaagaacttgtaaagaagttaggtgttcgtacctccggcccccaccaaaaagcgaaatcactgagtggaggaaaccagcaaaaagtggttatcgctaaatggcttggtatgaagccgaaagtgctcattttggatgaaccaactcggggcgttgatgtaggtgcgaaaaaagagatctatacaattatgaatgaactggccaagcaaggtgtggcaattataatggtttcttcagaactgccggaaattatcggcatgagcacacgcgttgccgtgatgtttgaaggcaaattaatgaaagtacttgaccgcaatgagttatcagaagaaacgattatgtactatgcgacgggaggagacaaacatgttcaccaataaacgagtcaaggcattaacagcgacgcttggtccatttatcggccttttccttatcatattaattattagcattctaaacccaggattcttatcagcgccgaatctcctcaatgtccttcggcaagtatccattaatgcgctaattgcatttggaatgacgtttgtcattttgacaggtgggattgatttatcagttggtgcaattcttgctttttctggagcggtcactgcaaccttactttcgtcagggatggacccgatcttagcgatcttaattggattgcttgttggagcagcacttggtgcaataaatggcataatcattgcaaaaggaaaagtagcaccatttattgcgacactggcgacgatgacgatttaccgaggcgcgaccttaatgtttacagatggcaggcctgtatcaaacttaggtgattctacattgttccaaatgcttggaggcggctacttttttggaattccaatgccggcgattacgatgatgattagctttgttatcttgtacttgattttaaagaaaaccacatttggccgtcgcgtatatgcagttggtggcaatgaggaagcatcgattctatcaggcatcaaagtcgaccgaattaagatttacgtatactctctgactggatttttggcagccgttgctggtgtgattttaacgtcgaggctaaattcagctcaaccaacggctggcacgatgtacgaacttgacgcgattgctgcggttgtgctcgggggaacgagtttaacaggtggaaaagggtggattgtcggaacgcttattggtgccttaatcataggagtgttgaataatgggttgaatttgcttggtgtcagctcttttttccagcaaatggttaaaggaagtgtcattttacttgcagtcttgcttgatcgcagaaaaacagcttaaggagttctggtattaggatggctcttaacctatcaatatcagtcggtgtttatgtcaggagatagcttaactttatagagggaggatttacaatgaaaaaacgacaattatcggttgcaatgatcggaatcgctgcactaatggcggcttgttcaatggaatctccagtttctgaggaatcagagccagtagacggttccaatggtggtgcaaatgacggtgaattcacagtgggcttttccatttcaacaatgaacaacccgttttttgtcactttagaagaaggggcaaaagcgaaagcaactgaacttgggttggaaatgatttcagtcgatgcgcaagatgacaatgccaaacaaatcaatgatgtggaagatttaatccagcgaggagtagatttaattcttgtgaacccaacagattcttctgcagtggcagccgctattgaagcagcgaatgcagcggacatccctgtgattactgttgaccgtgcagctgacagcggtgaagttgtcacgcatattgcatccgataacatcgcaggtggtgaaatggctggtgaattgttgcttgagcttgttggcgaaggggcgactgttgctgaacttgagggcatccccggctcatcagctgcacgtgaacggggagaaggatttaacaacgtcgcagatgagaatttacatgtagctgcaaaacaaacggctaattttgatagagcagaaggtttggcagtgatggaaaacatcttgcaaagcaatcccgacattgctggtgtgtttgcccataatgacgagatggcgctcggtgcactcgaagctgtatccgctattggtcgtgacgatattgttgttgttggatttgacgccacagatgacgctgtaaactctgttgaaagcggaggtttggcaggaaccgttgctcaacaaccaacgctaattggagaagaagcgttggaggctgcattctctgttctgagcggtgaggagattgatgactttattcctgtcgaacttaaattggttcaacagtagaaggagaaaggctcggtgcgtacgtgccgagctgttttgatcgcttttgaacggcttaaataatggtagaggaattccactaaaataccttgatttattaaaaagagataaaaagaattgcaggcgaatagaagcagatgcgcagcatctgcttctattaatctcgttacgcatccaacccctttagaatgttcaccacgttcatgcggttgtggtagccaaggaggttgcctgtttgcctgcttgattcagcccgatcccgaaacacttcaatccaatcgcggcgttcgttttcttgataagggaatggttgtgaaatgccttggtgttctctaaggtcggacagggctttatcgtaattaaatgtcagggtagcgagatcttggtggctaatctctcctgcctgatacaacgcagatgctaattcgtttaactcggcaaatgtggcgttgcggatatgatattttccagtaagctcttttaaatcaggaccactcttttgttgaggtactgaagtggcttgcgtttctggcattggtctcgttgctttgtaagaaacctcgtttttatttgctgcagaagctctagttagaacggaatgtgtggcatttgtaatgtgcatcgtcttccctcgcttttatcgaatgtagattgaatctgacagtggccggggcgctttttttgagatgtgcattctttatatcggttacaaaaaaagggaattgaacctttatatttaaatttatatatagacgactcgatcaatgtgaaacgcatttataattctacatattcacaaacactttacgtttccttcacctttcctttatgtgcagcgcttatgcttaagataagcattaagagaggggacgatgtaaatggcggtttttctcattgccatggtcgcatatctggtcgtagccgtgtcgttgttaaggcttcctcccaaaagcctttcctaaatagagtgatggtaaaatggaaaccgcacaacgatttatatcgtcctgaaatctgcggcttgttgcgtaacaaatcccccttaatgttcaatggctatgtaaatctcaatgtctccatttggataatacttttcaaaatcgtatgtgtatgccctcgttaatgtacgtgaatcctcgctttcccaaatctttttccacgtgtgaaccacaccttgttcatcggttgtttcgacatggacaatttcatagtttccgttctttggtattttcaatgaaggattgccttggctatcttctatcgcaatgcttaatgtataatcccccttatagtcactctcataattatgatacacaccataaattatctgattctggtttaaatgacttgaagcttccttccacaatcctgcaatcttttccatcaaccgatcgtcattaaaattattggtccgcacactgcttatgattgttagttccattagctttctcccttctgacgaaatgtgtctaaaatcttcattctattaaacacgtcaatttcctttttgttaatctatcgattcgtaacatgtttaaaccgtaattcattaaaatttataattagagcagttgagagcattcattaagtgaagccatcacacctatttttgcttcccgtcttccacgattttacacgagtttttcggttggtgtggttaacggcaaagtgcggcatgtacgcaaactactatacagagaaaaaaaccaacttatctaatgaatgaaagaagttgggtttttccgtgatttttcttgacttggtgttcactccaagtagtattctgtatttactattttgaaacacagaaaggaagggttaaatgaaggaacataacaaagtagtattgatcactggagctaactctgggattggattggaactgacgaaaaatctgctattacgaggctgggaagtggctgctttaatccgctctgattttccaaatgaacaaccaatcattattgatgctcttaaaaagaaccatttaagagtatataaagcggatttagctgatttcttaagccttagaaatgcacttgaccagattaaaaaaagcgaggctaaaattgatttgcttttcaacaatgctggagtctcttttgctgaatacaaatattccaagcaggggcgtgaaatccatttcgaggttaatacattagtgcctttcatcattacgatggaacttaaagaactgttactaaaagggcaggataaaacgataatcaacacatcttccaattctttgttatttttaaagcaatttgacttaaatacaataatcaatcctaaaactccttttaaaaagttgataggtccttatgcaaacagtaaattggccctatccttgtggacgaatggaattgcaccagagctatcgagtgagggaataaaaattcgcagtgtctgtccaggaccaaataagacgaggttaactaaaggaaagggaatgccaagctatatccttctcataaggagtcttatgtttactcccccaagtaaaggggcttcccgcttatacgatgctgctttcaacaacgagattaccgggatttttataaacaagggcaaagaaactgctatcaaactctcggggcatgaggaagaagtacttaatcgactgtatgatatttacaaaaatgagtttctcgttttataagctgcatagtgtgtggaattttaatgaaatgaaaatcagacagagggtgatgatttgggcacgtattctattaagcaaatttccgagaaaactggattaactgaagatgcaatccgctattatgaaaagattggcttgcttccctatgcaaaaagaaaacaaaatggacatcgaatttacggtgatgaagataaagagttaatggaattgattatgtgtctaaaaaaaacaggaatgtcattaaatgagatgaaaaaaattataaaattgcctattaaggaaaacatcaatgctattcccgaattaaaaagaactcttttagattataaagaaaagattatgactcaaatacaggatttgcaacgtattgtggcgtttattgataataagctggaaagcgattcaactttatttcggtctaaatagagacaacaacgattgttcgcagttgtttaaaataaagttgatcaaaatggccttataaagactgatttaacaaagagaagagagcctacatttgaaaaatgttgatcaaagcaggctttcttgtatttgttttatatagcaatatgcccagagggagaagaatgacccctcagccttgaaggggaagcaggaatagcagaaagctaatgtatggctatttgtttaattgactcatagggaaggggttttgaagcagagaagcctcggtaaggaatagttaagtagagtcacttgtcgtccgtaggtctttagtagcgcaacaaaaaccgacatagagcctcttgcaggaaacagggcacacttatatcctaacaataagaaatataaaaatagacaaataatttgtgtttatacataagcaaaaccctgattcgacagaaaggggaaacgacagtgaaaaagtggcttcgcataagtgcactgtgcacggtgttgctaattgggggatgcaatacagccaatgaccaacaagagccagaagaagaagtgaatggagaagagacagaggaagatcccagtactgaacaaacgccagaagatgatgacgctgaacaggaaggggagaacgaaggagtggagaataacgaagattttctagcggttgaagatgaatttacaaaagagtttttagtgtctactgatgtcgagccgggttttcaccaaatgagaggaaaacttgatggctttgagatgctgattccggaaaatgggattatttccgatctgcttcatgatattgaaaacgatgatgctgaaacggtcatttatacgtttaataattatcgtgaaaaaaaactatacgatgttcaagttatgtaccaaagctattaccctgaagaattaaaacaaagttatttaaatgtatttaaacgtgcaaataatttcgaaggagaatataagtatgtggaagcaaatggtttagaaatgtattacgggagcttggaagataaggatgagtacggcccgtacgtgcaatattttagttacctttttgccaaggataggaaccaggcgatttcatactcgtatacggcgatgtgccagggagaagaagaatgcactcttagttttgaagaggatatcgcgatggcggagaagctaatgcattccattcgtttgttagatcaataggaaaggagatttgggatgagcagtgttttcgataatgagatggtgcaaatgagaattaccaatcttgagtatcaattcccgaagatgaccgatgaggcgatcattgaagcagttggacggatttacctggaggaaatgggggagccgcttgaggcgaagattcacattgaacgaatggagaattattcttttaccgcagatgcgaaagggacagcgattgtcttggcagataaagaagatcctgatgaagtgaatgaagtggtgtttatctcccgaggaagtgtgtcacctgaagattggatcgacaatttgtttggtgttggtgtcggcaccggaggcgctcaatatgcagaaaacacggaagcttttcttgaggaagtaggcgaaaaaaataacattgatgaagaggtccccatttatgctcttgcccattccaaaggccacaacaccgtatctgcaattcaacttaataaatcgtacttctcagaagtgcacacgtttaatggcgcacaggctaatgctgtccaacaaatacgttatgacagagactttagaagagcggtagaaagggaatttaacctctcacgattaaatactgaatctgtccactccatccccgcctcagaactcgaagcatttgccaaggagtattacaaagacaaaggggcgaatatccatcaaacccgctccaagagtgattttttgtatgcgcttgattcctttccagggatgtttgttgtgggcaatgtggcaacgtaccgtacggaccatgagaacaaaggattcgtcgaagctgtggaagcgattcctcaagaagagttgcaggcgttgcttcattttctagccccgtatggcaatgtttatggggaggaaggggttgccggtgttatggaagaggcgtttggtgatgcattggcttattacaaagaccacccaaacgctgagccgcttgatattggggcgatgaaaacgacagttgctgtactcgtcgatgagttgggggaagcggggtatttgtctgaggaagatgcccggcagctgaaatggcatttgcaaatggtgctgacggaagtaggggcgatctatgagcggattcatgaaggagaaggactgtcaattggcaggatgatagaagatggcctgtttgctgggttattgtataagttgtcgatggaggatcggatcgcaacgatcaataaactgtttgacggaatcgcgaaagcggcggaagagcatcatagccttgaagcgctcatgaatgaaatcgctgaaggcaagtcttatcaaaatggcgatttgtatttggaaggttctgctggtagggacgaaattaagctgaatttgagcaaaacgttagacgcgtatgaagctgtaaaaaaggttcttgatcaacaagatacactgctggagcgctatttggcagtggttgagcatgagtacatggacttttacagtcataagaagaaacaactggctgccaaaatgagcgttatggagagcaactaccgggcttaccagcatttgttgcctagttcttatggcgggctcctcaccaatttgcgtttttgtgaatcgttttttccgcttgaaggcgcgccacttgaaggcgttgcttggttggtcaagcaaaaccgggagtcaatcggagagaaagcggaggcgatgcgccaagcagtagaagagatgtttgatgtcgaacacaatgtggccggcatgtttgcttatttatcaggataagggaagtgggattgatgaatacatttggttttagcggaacatatacgcttgaacaagcacgaacacacgacgagaaacgaaacctcgtggtggaattgttgcaaacgaaaatggacatgcttggtgaattgaagcaggaagtgaaaggcattctggactcgagcaaaggggaaatcatcttggcgtcgattgaagcgttggagtctgaggcggtaaaaggacaggaacggctgcaaacggcggttgatgaattgattcgctttcattgggagtttgaagacgtaatcgatcatgcgaaaacgcagccgtttacgatgacgtatgcagaagttcctaaggattagcgattggctttaaatagctgttggcttgttgggacatctagtttaagtgccattcttctataaagttagccgctttcgtctttgaagacgcataaaggagaagcgttttgccatttcctcggtacgtctattcctataggctcattcgtttgtccgagtccactgctccaaagacaaaaagcctaccctaacaaggtgctgtctatcacaggcaggccttggccacagcttccaattctttttctaacccctccaatatagcagcccgctctgttggcttttgttcgtcaaacagcagttgttcaagaaattcccaaatatcttcgagcttccgtctgccttgataaaaggccaagcattcttggtcaatgacatagtcgggatggtgcttgcgatagtgatccataaacgcattgttgtaacattcatcgacgacaaacatcctgtccgcttctactggcgcgagcttcagcccttcccagtcaattaaaaccagttctccttgtgacgtcatcaagttccaatgatgcaagtcggtgtggcataatgcatagcggagcggccgctgtttaagtgtgttagcccgtttttcggtcgactcaatcaatgacagaagtggttgtgaaaaaggcgcaatggttgtttgaatgtcatcaggcaacatcgcaagctgctctgtcagcagtttgtataaggagacggcaaaaggcaatgagaagtcttcctttagctgtgcagtcgcaataggcgctgtttcctctccgatggcatggagtgcggcgatgattgtagccaattgctcaacttggccgtttgttagttgttgtggaccgattgtttcgccttcgatgtgctcgtaaagtagaaaaatgcctttgtcgttttcgcatttgcattggccatttttggtaaggatcggcactggcactttgctgtttaaatcgttttgctcgttgagccaaatgagggcgggcacgtattcatcaatcagtgctgtccattttggcgtggatgttctgctcttttcgtacatttttaagaaataggtatgtttctttgtttcgactcgatacgcaagtgctgcccagccgcccttttgcggagaaatcgtttgtgcctgtaattggtactgttcctgcaatagtcgttttaagctgtccattgggtactccttgcacgatttgactttctgtgttcatcataaaaggaagtggctcgttgtagcaaggccggcggtgctgaatgcctacggttcaattcgcactctcgttccgatcgggacagtggcggcgagttcttcgacatcttcattgtgcatgcgaatgcagccatgggagacagacttgccgattgaggaaggatcatttgtgccatggatgccataatgcagtttggaaagtgacatccacattgttccaaatggacctcctgggttgggcgctttgttgacgatgacaaaatttccggttggtgtttgcgtcagcatttttccgaccgcaatgggatagatttttacgacagagccattgtggagcaaagtcaactgatgctgggaaagggagacatgaatttcatacgggatcgtgtttggattcggaaggccagggatgacaatcgattggccaacgaatagttgattcgggttgatcgttggattggcttgaataagatgggacaaagaaattcgatagtcagcggcaatggacgataacgtttcgccttgctggacgctatgaaaaaacattgcttatcctccaatcggttttatgttgcttctctatgagtctacgcattcgatcctgtcctcttgcatgcccttgtttggttatggaaaggatcacgttgttcgttcgtaatggaaggcagaaaggaaaaggtgatggttaacaaatttgcagataaacgcacggaatggaaagaacaaatcaatgagcaactcatccctttggatgaaggggagtggaagcagttagatcggtttttagaagggaagcagatcgtattactcggtgaaaattcacattgggtgagcgaatattatacaaataaaataaagttcgttcaatatttacatgagaagcatggctttcgtgtgctcgtgcttgaaagtggtcttgtcgaagcgagcacaactgatttttttggaaatacaaaccttgaagacgcgatgaaaaacggattattgggtatttaccataatgaggaaatgactacgctttttacgaatgagggcttagaggatttgacgattgcgggaatggatgtacagccgattagcaacgactgttcgcagcgtatcctctcgtgtgtggaaaaagaaataggcggccatgtggccaataaactaaaagacgtcgaagcgacgttctttgaattagaaccacaaataagaaatgaggttaagttggcgaaagacacgaagaagcagctgaaacaattggccgaggggtacgaagaggtgatctcgttgatggagaatgagatgcaagcaggagtgtattctaaaaggctgcaattgatttatagggggatcgtgaaccgaaagcagtggttgctcgttaacttaaaaggccgttttcgttcgggaagcttgagagacgtgtttatgtatgaaaacctcgagtggttgtttgactactataaaggcgagaaaatcattgtttggtcacacaactatcatattcgcaaaaaccgatctcttttattaaaaggattaggaatcaagacggtagggcatttgcttgcaaaacaatacgctcattctttgctttcggtcggcttttatgcgggcagcggtacgtgtttgtccccttacaagcaaccatacgacatttccgtcaaaaatcaataccatcttgaaaaactgctaatggaatttaatcgcgacgtgctgtttttgccagtgaatgttgatgcaatcggccaaaaacgtccttggtccaaacaaaactggtggctgcttgaaatgaaatggctaggaatggccccgctcgttatcaagccatacaagttttatgatgcgattttttttgttaagcgtgtaaatccaccaagatattgggaggatcaggactaaagcttgcttccatctgttaaagagctgtttttctttcgccagcgttgatagaacgctggtttttattttgctgtggttgctcgtttttgtgcatgttcttgtttcattatcgtgtgaaaacgagcgatggaagcaattttgacgtagtactaaattcttaagtcattcgattcatttctgccttttcttgtccgataagaaaagagaactagccatgtatggcgtgtagttagccaattttaacaacttaggagggaacaggaaatggagaggatttctcaactgtctttacggcacaaattagcgattccgattgtcgctttagtcataatttgttttgtgattctgacatggatgagccaaagtacgttaagcgatcagttgcaccgcgacttggagcgtgaattgagaagcgttggcctgttaacagcatcttcgcttgatccaagtgatgtagaggcggttatgggcgttaccgatgagacggatgaagcatttgtccacttgcaaaaccagctagagacgattatggaaaagcaaggcattatgtactggagttacatttggcaaatggagggggacagcgttatcccactcggctttacgaaaaatctagaggacgtttataacgttggcgaatcgttcgataacttggcatcgattcatattgaaggcgggcatcaagcgattgaatcaggggaacctgtcgtcaccgatgtctttgaagatgacttcggtacgtggagcactgtctttagcccaattgaaaacgaacatggcgaaacagttgctgtcattggcatcgactactcagctgagtacattgacagcattctcggcgagctacaacttagccaatggttgacagcaattatgggaacgctcatcgttgcctgtttcgtttattttgtcgtgaatggcctcttaaaaccattaaaacaagtcgttcaagtgacaaataaagtggctgatggagacttggctgttccatctttagaggtacgcagcaaagacgaagtggggcaaatggctacggcgttaaaccaaatggtgcaaagtttgcgtggcttgatccagaatatggcttatgcgtctgaacaagtagcagcgtcatcgcaacaagtggcagcggcctcgaaccaaacagagcaagctgcaaatgaagtggtcgcagtaatgggcgacatggcggaaggggcacgggtttcccagcaagcagcagaagatacggctaaagctacggaagaaaacgcccaagggattcagcgtatcgctcaatcgtcagcagtcgttgccgagtctgcccaaaagacagcggcagaagcgagccaaggcaatgacattatccaaaatgtcgtaaaacaaatgcagtctgtcagttcgtcggtcaatcaagcaggaaaagaagtgcaagaacttggcgaacggtctagtgaaatcggaaaaattgttgagcttattacgaacatcgccaaccaaacgaatttgcttgcactgaatgcgtcgattgaagcagcgagagcaggagagaatggccgtggctttgcagtcgtggcaggagaagtcggcaaattggctgaacaatccgcagcctctgctaaacaaattactgatattatcgctgaaatccaaacggtcactgagcgttcggttgaatcgatggctacggggacaaaagatgcggaagaagggcttgccagcgttaatgaagcaggagaggtattccaacggattttaggagcagcccaacaagtcgcggcccaagtagaggaagtgtcttctgtatctgaacaattatcggctaattcagaggaggttgccgcctctgtccaagaattaaccggatttgcagaggaaacgaccaaccgaacagacaatgttacgaccgtttctaaggaacagctcgctgcgatgaaggaaatcgccgcaagttctgattcactgacacaaatggcggaacaactgcaagaatcgatgaatcaatttaagcttgagcagcaaaaggacgtgttggaatgaacgccctaaaaggcaaaacagccgttgttacaggagcgagcaaaggcattggccgggctgtggcgttggagctggctaaagctggtgcggacgtgctcgttaattttattggcaatccggaggaagcagaagaagtgtgcgcgatcgccgcttcctatggcgtacgtgcgatgaagtggcacgcagacgtcagtgatccccagcaagtgagggatatgtatgccctcgttgatcgggaatttggcaaaatcgacatccttgtcaacaatgcaggaattgcggaagaggcgcctatcatagatatgacggatgaaggctgggaccgaatgatccgtgtccatctgtatgggacctttcacaattgccgcgaagccgcaaaacggatgacggaagcgaaagctggaaagatcattaacatttcctctgatctggggcatctaggttgtgaaaatttctcccattattcagcggcaaagggagccatcaacgcgttcacaaaatcattagcacgtgaattggctcctcatgtgttagtcaatgctgtggcccctggcggcacatggaccgatattcttgcttcgtttggcgacgattatgcagaagaggaagcgcaaaaatacccattaaaacggcttgcgaaaccagaggaaattgccaaaagtgtgctgtttttagcttctgatgacggcaatttttacacggggcaaatacttgggccaaacggtggggctgtcatgccatgataggagaggacacgcaatggaaggaataatcatttttctcatttacttagtttttatttactatatgggctataaaggttaccaacgtgtgaaaacagcagaggatttaatcgtcgctggttggagtatgcccctttatgtcgtaaccggcagcttagtcgcagctttgctcgctgccccattcttttttgccgcagtcggctctggctacacaagcggcggcttcgagggaaccgcgacaatggctggtttagggacatgtatgattcttggcgcccttatttggacgagaccgctcaggcgcttgcgcggttggacgattgcagactattatggtttgcggtttgccagcaaaaaacttggcgcttatacaggctccgttatggccgttgcatttggcttttttaatgcaggcgcactgaccgttggcggaacatatgtcattcaaacgatttttgcgatcgattttattccggccgcttgtctgtttgtgttgttaaccgttgtttattcagcaattggcggtctatgggccgttgcttatacggaaattgtgcaaggggttgtcgccttaatcggcattttaggaattgcaggcgtggtcctgtttacgcacggcgatttaacctttcagccagactggtggaatgtaagcaatttgtttgaaaaaggcggcgttgaattttgggcgctctatttggtgctcgccctcggagacattcccgctgcggaccttggccaacgtgttgccggcgccaagagcccacgtgttgcctacttgagcatgattattgctggagtgattgtcattagcatcagttggataccaggcatgttaggcgaagcctttaaaacgatctttccaaacagcgacaatccagaaatgctcatgattatgttcgctgatggctatttcccgccaatcatttcagcgatctttcttacatcgttggcggcgatgggcatgtcaacgctggctgcttgttatgtggcatcggctggtatttggacgaagaacatttatcttgatttaatcaacgaccagcctgatccgaaaaagttgctgctcttttctcgcattgccatttgtgtgagtgcggcgctggggcttctactcgcattaggtttccaaaaagtcattgatctcgcctatttagcttgggatgtcgtgtttgtgacattgttttggccgattgtccttgcgccattttgggggcgtgttagcacaaaagcggtttgggccagtgtgacgcttgggctcctttcttacggggtgacgacgtttaccggcgttcccggtcctgaagtagcctcaacaggtattatcggtctgttagtggaactgtggcatttgccagtctttttcggtgttgtcatctcaggcttgacgatcgttatcacaagtttggtttccccagcaacacctgaagtgcggaacatgcatgaacttgaaaagataccgacggcagatgagtagcggtaatcgcgccctacacactgtcatcaatagaaggcttgttgcttttttggcaacaagcttattttttcctatttaggttgtctctccactctgctattgccctctgactaaaggcagcgctgcacaatggatgccgccgccaattttgcggatttccgtcgtgtcaatcgtctttgtgcgaatgcctgcctgttgtagttgtttaatcgtacctggatattcagaagcaatcaagacatggccaggtgctaaggtgaggcagttggcggcacggtctggatcattggggtctgtataaatcaggcgatagccccgtgatcgtagctctttcaaaaaccaataaggaagccgctttggctcgactagagcggtttttgtgtcgacaagcataaacagctcatctaagtggatgcggtcagcaggcaagtcgacgacgatcaactccatttcttgccatgctaaaatggtacggagctggtcaatgcctgcttggttcacgcggaccgagcggccaacgacagcagatcgttcatctagcatggtaaagctgccgccttcgataaaaccgttgccttgaatcgtggccaagactggcatgcccaatttggcaaaagtgcggtaagccgcttgttcttcgccttgacggatgcctaaagcgaaccttggcaagatgacgccaccaggaacaacaaggcctaaatcatgaacatagattgacttcgggtgatttggtgaaacaaaatccaagtctataacttctgcaccgctatccagcaaagcttggcgcaactgatcatgttggcgatgcaatagcgccacatcaatcggatctgttccagttaaatcgttgccgatgacaccttgattgtcttgtaaaatttggtcgtctatatacgtttcatagcttttgttgtctagttgtcgcaattcattaccgggacggtgaatcagcactttttgaatggggccaactggagagaaggctccccataggccgccccacaccgcttgttgtgcgtctatgtcgtaaaaggaatcgacaaccaatcgttgtccaggcaaatggtttgaaggcaatggcaagtaacatctctccttaatgtttaagcttcttttcctagtgtcgacaaacgagaatgcagtaatacgtaaaataaacggaagagagatggcccaagcttgcgcaatttggatcaaaaaaaagaaaagacggtttgctatgataaaagggcgagaggggggaggacgatcgattacaacaaaagcatccaaacgagcattgcctacattgagagccatttacaggaccccatttcggttgcggatgtggcaaaaaaggcgggctattcgccgtatcatttccaccgtgtttttttacaggaagttgggctgagcttgtctgaatatataaaacgacgccgcctttgttttgcagcgaaaacattattgcatacagacacacctgttattgaagtggcattttcctgtggcttcgaaagccaagaagcgtttacacgcgcgtttaaacggctatatggcttgccacctgcccgttatcgcactcgatttcaaccacatcaattcattcaggcaaatggagggaacatgatggatttgcaaacatctccgataaaacactggtttttaagcggcagtcagcctgccgaatacgagtatggattggacaccgaaaccgttcaccaaggcagcgtatcggcttatttgaaatcgtacgcccttcaagaagaggacgattttgcaacgctgatgcagcaattcaatgccaagaactatgtaggcaaacgtgtccgtttttccggtttcgtcaaaaccaaaaatgtcaccaattattgtggcttatggatgcgagtcgataacaatatgaacgatgcgctccaattcgacaacatgtcaaaccgcaagattgtaggaacgaccaactggaaccgctatgcgattgtgttagatgtccctgaaaacagtgccgttatttcctttggccttttgttgtcaggcaaagggcaagcatggctcgatagctgctcctttgaagtcgttgacaaaaaggtgccgtcgacaaacatagagatgaattttacgatgtatgatgaaccattaaatttgtcttttcaagagtaaggagtagtaaaaaaggagcctttgcacaccgcaaaggctccttttttgtgtgtggaaaaatgggcattgacaaaatcgttatttttgtatatatatgatatatacaatatgaacaaagtatacattgagatgtcggttacttcaatgtatcaacgggtaaaaaaacggcgggcgttggcacaagtgcttatcggttggcaaacgcaaactcaagctaatcgatttgcacagcggattgactatcatcttacaatcaagaaggagaatggatatgtcgtttattttagaagtagacaatttgagaaaacaatattccgattcggcttttgccttaaagggtgtgtctttttcgataccgtacggctcgattgttggatttatcggagaaaacggggcagggaagtcgactacaatggggtctattttaggaacactccagaaagacagtggcaccattcacatttttggagaagagatggcaccagacaaactacatctaaaagaaaatatcggcgttgtgtttgatgacatcaaactgcctggggacttaaacattgtgaaactaggaaatgtctttcagcggatttacaagcaatggaatcaaaaaacgtttgaccactatgttgatttcttttccttgccaagaaacaagaaaattagagggttttcacggggaatgtcgatgaaactctccgctgccgttgccttgtcccacgatgccaaattgttaatattggatgaagcgacagcaggccttgacccgacgggaagggatgaactgttagatgtattaaaaggatttgttcaagacggaaagcgggggattttgttgtcgtcccatattacgagcgacattgaaaaaatcgccgactctctcgttttcattaagaacggaaaaattttgttaaacgttaaaaaagccgaattgcgggagaaatacgcgattttgcaatgcaggcaaaatgagtttgatcttattcagcaaaagttgattctcacatataaaaaaaatgaagacaccgtcgatgtgcttgtgtctgatcgggaacaagtgccttcttcgatcacgaaaaaagactttactattgatgatatgacgcttttgttaatgaggggtgaaacagcatgaaaggcctagtcttaaatcaatactactctgtaggaaaaagcttctggaattatatcgcgttaagtgtggtcatcaccgcgattttgctgtttactcaaaatgagatgctgatgcagtttgcagcatggttgccgctcttttttatggttacgccagccctagaagttttaaagcatgagtcgatgtcaggctggagtaaatttgtgcttacgctgcctttaaaaaggagggaagtcgtacaaagccactatcttttttactcaatgatgattgtcattggcatagtcataacggttgctctatttatggttgccgattccttgattggccaagtcatgaccgattccgcggtgaataagataatgaatggtgtcggcatcgttcttatttcaggcttgcttaactatccattgacgtacctgctagggactgaaaaatcggatggcatccttgtttttagcatcatggctgcagtcgggttgtttttactaagttcttggctatttgaaatttttctaggcgctgtttcctttgatgcactacaagggatgaatctagacaagctgttctctggaagttttttagcggtcacgtttgtgctattcatggcctcctacgtaattgcactgcaagtgtataaaaggaaagaattctaagcgagtaggtgcgaaccccaagcgcacatgaaatcccagggaggttcgcaccaaaatgcacttttaatatgtaataatgtgtgtaaaaatgaattaatgtgagtgggaccacatggtaaaataggagagaaaaacgaaattcacgcttttttggatgtttcattccataaattcgttgaaattcgctgtcgcactctttgtgagtgcgtggattgaaatttaaaatgtggcgtcctagcggcgccttatacacgtcgcactctttgtgagtgcgtggattgaaatgctagtttagctcgctcagacagagatagaaatacggtcgcactctttgtgagtgcgtggattgaaatgaatgctgaaaagtagtaattccaagcgggtaatcgtcgcactctttgtgagtgcgtgggttgaaattccttctgaggctgaacagctggcgtctgccatgtcgcactctttgtgagtgcgtggatatgaatcgcgctcttctcagctgccaaacgttggtagtcgcactcttcatgcgtgcacacatgaagagaagaacgcccggttagactgaatcaccaccatctatacagcagccaaaacccttattttacagcgttttggtttgttttgttgggctgcttgacaaggtatggctatgttctgtaaagtagttatcacactaactacttagaggtgctgatatggaagaggcagtcattcaggagctgcaaaagcacggtttttccaaatatgagtcaaaagcgtatattgggttattaaaggcgccagcgattacaggttatgaattaagcaagcgctcaggcgtgcctcggtcgatgatttatgaagtgcttggcaagttgctcgataaaggggctgtgcataccgtgcccgctgacccaattgtctataagccagtggatccgcggcagctattgacgaaaatgagggaagatcttgatgcttctttgacctcattagaggattcgttaaccactttagaaagcgaccaaaaaatcgatgtggtgacaaggattgtccagtatgaccatatcattagcgagatgcgctccatgattcgggcggcgaaaaaagagttatggttgtcaatttggtcgccaacggtggcaagcattgaggacgtgttaaaggaaaaagaaacggacattccaatttttaccgtgttgtttggcgatgaaagcaagtcatttgggcatacgtaccaccataactatatggcgcccaacattgtcagtgaacgaatgggtggctatttgaccattgtcattcgtgatgaagaagaagcgttgattgcaaaatttagcgataagggttcagaatgggctgttaaatcaatggaccctgctttagtgctcattgctacagaatacattcgccatgacattatggtagaagaagtgaccaacgcatttggaccagagaagctcgatgctttatggagaaaacgtgaagatttgattcacgttatgaccggaaaaagcagcttgtgataagcgtaatgctcaaagcaagctgtttattttggaggaatttttagtagttagtagtataacttctaggagatgtacgatgaatgcacatgtgaaatttagtttggctatggcgattttcggttcaattggattgttttccgtaaaggctggtttaccatcgttagagcttgtatttgttcgctgtttgtgtgcgagtgtgatgctaggcgcagtactattgttaacgaataggaaaggaagagaggaacggccgccgaaaagcgagtatggaaaggttttattatgtggcttgtttcttgtgcttaattggctcttctttttccgttcattcgaagtcatgccgattacggtagcagtgtcgatctatcatctagcgccacttcttatcttacttttaggttcattgttgtttaaagaaaagttgacttgggcaggcatcgcctcgattgtgatttgttttgtcggtgcattgctcgtcggcaaagcgtatagccacggccatgtttcggactttttgcagacaggtattggttgggcttttgctgctgcgttcttctatgcattaacgtcgcttgcaggaaaaagcatcactgttttatcaccaactaaaacaacactaatacaaacaatgcttggtgctgtattattggcgccattagtcgattggcacttattttcgggactttccgccgagaactggctgtttattcttataacaggatttatccatacaggtgttgtcttttattttttcttttccagtttaagagaattgcctgcttcgacgattgctatattggttttcatcgacccgatcgttgcaattttgttagatgtcgccgttcttcactatcgccccgatatcctgcaacttgtagggattttgctaatttttttggctatggggtaccgcccgaaaaaatacgaacagaaaaaggcatgagccccgttgttatactgtgaactgtactttagtgaattgaaaataaaaggatggctagctaatagtgttggagagctaaacatcagtgtaagtttccgaacgagtttttgaattagatgggggcgtatgagggggaagcagggtttgccaaatgagtttacgagctgaaaagagggcctgtgatggcaggccctgtttattaggaaagggaaccgattaaataaacccattttcagctaaacattctaggtaaaactgatagtcagtgtcggtcatgtcgccttccttcatgccctcaatcccgattcgggcaactaagtacgtaactagatgatgggcaaagccatataccttaaaatttgttacgtaatctgtttcgtctttttctaagaccacagaaacccgttttccatggttatgctcatggataagttgattatacgatacagactgcccatcattcttcgattttgtttgcgaaacgatatagctggctttttcgtaaattgtagacagaaaaggctcttttatcgcatcgatatcatccttattttgaatttgtttaagcacttgtttattggttattgtgtaaagtttatagattcttttttcatctacttcttcatcattttcgtaatctttacgaggaattgtgaataggggcaattctttcgcctcatatttcctctctaacgtatgttcaatctgaaatcgatttaattttactggtttcaaatgtttggatcgtgcatccagttccttataattcatggttatctattcctacctttactgtgcttgcccatcaaatgtgtttatttttggatcttttatcggtttttttaatggtatttccattaaagcttaagagaggttaaacgttcaagcctagattattcgtaaatattaaacagctacttgctagatagcgtaatgatttctctaggtatagcttcatacgttgtcaaatagactcatattcattgcttatctccatgaacgcgagcaaaccaagcaaaaatagttgaaagatcgttgtttttaaaaagtagcgctacccttggcagagcagcgcttggcccgtcttttaccgattggtatgaatggcctccatttcttgatcgtaggcggtgcggcaaatgtcgatgacgcctgggctaatgttgcaaaaggcttgagcgccttgtatgactttttttacacggggctctgaaatcactgaagcagggaaggcaagaatttgtgaaatggtgatcgccaagttttgtgtcagcttcatgccgttgcttgtcgtcatttctccgtctacgccttcccaaatcgctaaggcaatcgagaaagcacagctgatcgcccctaaaagcgtttcgcctaaatcaagaaggagctcgtaggccagtttggcaatgcctttgtttttaatctggttgcccaaagcgagtccgtctttaaggttaaaaccaatttgaaacaaagcataaaacatttcaaacccaagtcgtttttcgtacggtttgtacgccaaatcaagcgacaatgtcgtaacggaggtagccgttccgacgctgtaagacaaaaacacgacagcgcaaccaattgtggtcgtttctgtgaaagacattgtcgtgcttgccgtgccagcaataattgaggcgatgccgccaataaagccgaatgcataactggcttttcttgccgcaatgggaacctcgggttcagcggcggcttgcaacagaacaggggactgctcttggtcaagggcaagatgaggttgcttgccgccaagctttgcgagaaaatcgccataggattgggaattgaccaattgcgttgttgtttcttcctcaaaaggaacgtcgccagttgtggctttataaagtacagtagcgggaattgctgttagcaaactaataaagtcaattaacgtcaatttgctgccaggcgcgactatttcttcataaagaggggtaaggagcggcacattccaatggatatgcaacaagtcgtcaaccatttgcgtgatttgctcagccgctgtaaacaatccatcagcgagaagtttaaccccctctaatacggcgtcttccaacaaggagatgatcttttggaacagagttgcaaatgaccatgactcgaattggctggcaagttcagtgccaaattgctcaaactgttgcttgacgctttccagtccggctccccatgattcgtcataggcaagtgtgtctacttcaggtaggtttccgccaggtttcagcaaatgaccgctcataacgtaattcatcgaccaattcgcttcaggtgcttcaaataatagctgttgtccgtattcttgctcggttaaggtgcggctaccaaaggcaccaatgttttcttgcaaggctgggtcagcgatgttcctttggacatgttcaatcaaacggtcaacaaacgccttcccttgatccaacttttgcacggtttcttttattcctagttcaacggttgtccgaataacctcatgcgtccgcaaaatgtctttccatttaaataaatagccgagccaacggacaaagtcatccagcagaatgtcaatttcggcaaacacatattcgatcacgtcccacaattgttctgcgtaacgaagaacaacacggtacgctttttcggcgctgttaattactagttcaatgccttcttttactttgctgaaaacgaagtgtgtaacggtgataaaaccttgttttattgcatgccaaatatccccaaaccaatcgctcagtatgtgtgccgtgtcttttgtttggttcaacagatgggctcttggattgaagtgttggtcaatatggcccttgttttccgtatagacagggtgctttcctgttaagtcgagtccccaatgcatgctgtcttcgacgtgggccagtgacaaagtattagccaaagggatatgtttagaagaagtttgaaatggcccttgcttatgacttggtaaggtttgtgccatcgttagcaaacgttgaacggcttggtgcgtatcggcgatgtcttgttttgatttgccttttaaaagtggttcggtaacgccatcttggtcggtttgcatttccgcgttgatccattcatctaccgtcatgcctgtcagcttttgctttacttgtgcaagcggttcgatatcaatggtttcgtttaaggctggtatggtaattcgtagggcagctgcagccacgcttttgacgtactgtgtaatcatcacattcccgagagaatccgtgtttgcttcgatatagccagggcggtcagtagcaaaatatgtttttccgttaatggtcagttgcaccaattcagaggcttgcacccagatggtttcgttgaccgcaggtgctcctttgtcgtcgactaattgaatcacggtactgtatccgtctttctcttcaattgtgccaagggattcaaacaggatttgttcgctatgccaacgcgttgtcgaaacatcttggaagtatcgatataactgattatctaaatcgacgacaactaaatgattttccccggtagtgcggttgacccataatgccgattctccaacttgttcttgaaaaagcaagggctccgtccaactcgtttcgtcaaaatgggagcgagaaagtttcccgtcgtctgtaagcagccaaatgtctgtgcctgagtttgttcgtgctgccaaaatttgtttataggggcgtttggagggattgccatcgattttgcgcaaacctgcctttaccgttttcgcgtcttttgcgagttggacagcagggcttgcgtagtataccgatgtatcgccaagccaacattcagagtttgaaccaggagcagttacaagcgcaaagctagttgggctgaaatccagcggcaccggatggttgtaataatgaaaatcgggcaaagacgtaatgacaagctgtgtttgtttgtcgcttgtttggtacaaggcatataacagcccgtcgacgccattgattgattccaatttgttatggtggccaatagcagtctggatgacgtgtttgctgttcaacggggcgggaacttctcgccataaccatgtcgtgtcggtcaggttagggttaataagatggtttgatgagcgatccttgtcttgcgttgtgacaacaatgaatacttggccttgttttccgtatccggtagcaatgtttgacaccgttccgccgctgtattgtccccggaatagccaacgatcctttgtgtggtcagaaaagtctttagtcatgtacactgtataggtttgttcctttaagacaacggcggtaaggagaggagcgccgtcagcgtcttgaatcgcttcaataaagaccgcttcactgtgctcgggcaggccaccgcttaaatagcgggtgttccagcctttatctgtaccgttttctttgctatacaaataaataaggccatcactgccaattgaaaacaaccataattgcccatctgtgcctgttgtcgttgttaatgccttatcgtattgcaacggagtaccagatacatagcttttcattaatgttgattgaatcgaataacgggaaacacccatttcgttgaccccctacatgtgagctaatttttaacagttgttgcgacaatcatcgaaccattctcgtaaaactgggcatctttaaacatgatttctgagccgccgggcaagattgcacgtgctttcatgctgtttatttgtgtactatatcctgtgttaatcgttttttgccaatccttgcgaatgaggtcctgaaagacgtcgtccacttggccaaatgtaaaaactgtgatgataaagtcagcaaaaacagcaagggcatgttcaaactttccaagcgcatttggatggtctttttttgtcgtaatgacttctgaattttttgcagatacattgacgctgcttttgatcgtgtcgacttcaaaggtgagtgttgttgtccatttgatcgtgccgtcgacgtaaccgatatatgagccggccaggtcatgcatgtctgtgttgtagtcaatgttaaaataaacagccatttgcttggtacctacaaggggaacaagcgtgcaagtggtttttcctttggtattcttatccaaacggctttcaaacgagacaaaaaattggttgttgtttgtgggggaaaattgcgttttatctatagacagcatgtttgccaatgattggagcaatgggtccatcacaagggcttgtgatagcacaaaactgccttctacctgatcgctcattacccaattatgttgaaacattcctgcgccgcttcctgggacggttttatggtctgttacgagcaagtagttaatgctgctgcgagatgcaaaatgggcgtctgagtaaatcgagtacgtacaacctgtaggctgccaagtcgcttgcgatggctcactgattttgtcaactgcatagtaaccgaaaatataagggttgtcgtttcctttaatcgtgtctataaaggcttccaccaggtttcggatttggccagtcaattctggctggtcagtgggaatagcgccatttgtttgaaaatcaaatgactttaatagattagcgtcctcgaaattaagaaacaaatgctgaatgctgaacatgctcgtatcaaattgttcaagctgccgtttcacttcgtccggaatcgaatcttggttttgatacgtggaagctagttctgctaaactcatattgacaaaaaaggataagctgctgccactaatctcttttgttgtttgcacaacggtaggctttccgtcctctataacaattttggcataatgaaagcttgctttcgttaacggcatcgtaagttttgctgttcggctcgagctgtcccctgtgttaaagtcaacaacagggcagcctaactcagcatcaattgaatagagtccctctgctgcttccgctttccatgttgttggcaacatgtccattgcccaaagtaactgcagttgagcattaatcgtttgttgggagacggcatagaccatgtcaaacccgttcaaattttgatacgttagcaagatcatcatcctctcttttatgtgccttttggcccatgcaaatacacatgtctataagcacaacttaatcgtattcactagcaatgcctgttattctaaaaaaagaaagagccaagtagtgcaaatgactgaagaggatggtcactatccccgtataaaaacgttttcgctaaggagaaagccctattatcaaatgaatggcaccaacgaaaacacgaaacaaataggcgtgttgccaggcgctccatccaagcagaaattgcttctccatgatagactctctatactagacggtagaaatgatcaatagagagagggaagcccattggctacgataaaggagattgctgaaaaagcaggtgtctctattacgacagtttcgcgagtgctcaagcaagaccccactttatctgtgacgcaagagacgagggaaaaggtgtatgaaaccgcgcaacggttaggctatacaaagaaacgatttaaacattcgttaaagaaaattgctttcttgtattggattacggaaaaagaagatttgcaggacgtttattttcaaacagtgaagaaaggcgttgaggaggaggcaaacgaacggcagcttaacttaacaacgtattcgatcggtgatggaattgaggcgatcgacccgcaaacaaaaggcgttatttgccttgggcgctttagcaagcgtgagctagattatatccgtacgttaacaaacgacgtggtgtttattgatacctcgcctgatgaagaccatttcgattctgtacggccccatctccgcaggatgattgaacggatgattgattactacttggaaaatggtcatacagcgattggttatattggcggcaatgattttgatgccgattgtggcggttatattcccgatcgcagagagcgtgcttttaaagaatatatggagaaaaaagggcttttcgatgaacggtttttgtttgttggcgaccaatatgctgtaaatgaaggctatgctttgatgaaacgagcgatccactcccttggcgaccagttgccgacagcattttgtgtagcaagcgactctcttgccgttggctgtttgcaagccttaaatgaggaacggattgcgttgccggagcgggtaaatgtttttagtataaatgacgccagcattgcccaatatgtttctccgccgttgacaacttttcggattgatgtaaagcttttgtgccaaacggcgattgacttgttattagaacggctcgtcgataaaaggacttctccaaaaacggtgctcatgtcatgtaaccccatctttcgaaaaagtactggctaaagtgtttctctataagcctgagtgtagtaatcgactttgtcgacaacctctagagtcctaaagggctctttttttttgttattaagtaaaatattttactaaatatagatatacaaataagtttacttttttcgtgaatgttgttattttataagaaagcggttacttttttgattgaggggatgacaaatgaaaacgaattggcgaatggtgttgcttagtggagcagttctgaccgttgtcgcttgtggaccacaagaggacggcgatgctggggaaagtgctagtgggacatctgctgataaattggtgatttgggaagacgctgaaaaagcaattggcattgaaaaggctgttgctgcttttgaagacatgcatggaattgaaattgaagtgatcgaaaaagagtatggcgggcagttagaagatttgcgtttagatggccctgctggttctgggccggatgtattgacgattccccatgaccaaatcggcactgctgtcgtcgaagggcttctcgctcctttagaggtcgatgatgaagtgacaggccgttttacggaagagtcgctgctttcgcaaacagttgatggagaagtttatggattgccaaaagcagtagagacaacgattcttttctataacaaagaactggtagacgagccgccgcagacgcttgatgaatggtatgagctatcgaaagagagggtcgctgaagacgaatatgggtttgtggcaaagtgggatgaaatttattatgccatgagcgtcatcggtggaggtggcggctatattttcccgcaaaatgaagatgggcagtatgatgtgaacgatatcgggcttgccaatgaaggggcaattgaaggcggcacgtacatacaaacgttttttgaagaagggctgtttcctgctggcattgttggcgagcaagggattaacgtgcttgactccttgtttactgaaggaaaggcagcagcggtcatttctggaccttggtcgtttgagccgtatgcgcgagctggcatcgattacggtgtattgccgttgcctgctttggcggatggcgagccgatgagttcctttttaggagtaaaaagctataatgtctcttcttattctcaaaatgcagaactggcacaagagtttgtagagtttttgacaaatgaagagaattcactggaccgttttgaacaaacgcgggaaataccgccgctcacctcactagtggaacacccggccattgctgaagacgagcatgcggcagccgtttctgaacaaagcctttacgcgacaatgacaccgaacaatccagaaatggccgaagtgtggacgccaattgacaatgcgctaggattgattgcgacaggacggacagatgtacaggaagcattagaagaagcagttcaaacaatcgagtcgcaaatcgaagcgaaccatagccaaaactaggagcgaacgcctctattaaaagagaaggtgaagcacgtgaaacttgacgagcaacataagatgaagcctgccacgaaccatgcgctcgtggcgggaatgctcgccattatccccggaatggggcagatgtacaataagcaatttgcaaaaggaacgcttttcttcctttttgtcgcagcgtttctgtttgtatttaaagacatttttaatatggggttttggggattagcaacgctaggcgtgcaaacgccaagagacaactccgtctttttgttagcagaaggaattattgcggtcattgtggcagcgtttgggcttgcattttactatttcatgattaaagatgcggcgaagaacggaaaacgccgcgacttagggcttgagcttcattcgatccgccgccagtaccatcatttgctcgatgcgagctttccctatttgatgagttcacctgccttttttctgctaatctttacggtgatttttccgattttgttcagtttggcgattgcctttaccaattatgatttataccattctccgcccgccaacttgttcgactgggtggggttgaaaaatttccgtgatatcttttctgtcccgatttggcgttcgacctttttggatgtgcttggctggacagttgtatggacgcttgttgcgacaacgctccaatgcgcgttgggcatttttttggcgattttattaaatcagcgcgatgtacgggggaaagcgtttttccgaacgttttttattctcccttgggcggtgccggggtttgtaacgattcttgtgtttgctggcttgtttaatgattcgtttggggcgattaacaaccatattctcacgttttttggcgttgatggcctgccttggctaaatgacccgttttggagtcgtgtggcgttaatcgttatgcaaatgtggctagggtttccgtttgtgttcattatgacgacaggcgtcttgcaagcgattcctaatgatctttatgaagcggcgacgattgatggggccggctttatccagaaattccgcttgattacattgccgcttgtgctctattcgattgcaccgattttaattacacagtatacgtttaattttaacaatttcaacatcatttatttgtttaatggcggaggcccacctatgccaggctcaacagcagggggaaccgatattcttgtgtcgtggatctacaaactgacgatgcagtcatcccagtatgcattggccgcggcgatcacgatgttgctgtcaatttttgttatttcgattgccctttggcaatttaagcgtacgaactcctttaaagaggaggatatgatgtgatgacggtttatacgaaaaggcgcattcgcttatttgtgacttatagcattttggttagcgttgtccttgtaattgcttatccccttgtgtggacaatcggggcttcctttaatcctggcaatagtttgatgagcacgtccatgatcccagagaatccaacgctggcccattatatccatttgcttggggaggggtcgcatccttacgttcaatggtacctcaactcactaaaaattagcctccttactatgggcataacgcttgtgcttgttagcttttctggttatgcgttttctcgatttcgtttcaagggaagaaaaaatggcttgatgctgtttttgcttttgcagatgatcccgcaattctctgccttgatcgcgatctttgtgctggcgcaaatgctcggcttgattaatagccactgggcattagtgttgatttatgcaggcgggcaaattccgatgaatacgtttttgttaaaaggctatcttgattcgattccccgtgacttggacgaatcggcacggatggacggcgcaagccattttcgcatttatgggcaaatcattatgccccttgcgaagccgatacttgctgtggtcgcgatcaattcattcacaggcccactaggtgactttattttagcaagcgtcattgtccgttcgccggaaatgtatactctcccgattggcctttataatttagtgtccaatccaatgggagccagctatacgatgtttgcggcaggggcgttgttgatttcgatacctgttgcgctcatgttcttgttgttgcaaaagcagtttgtctctggattgacacaaggaggcgtcaaaggataaacgaaggagatgatcggaagttgagcttgcgtggcaaatggccgtttgtcgtattgctagtttgtatcgttttatttggaggtgcggatgtgaaagcagcggttacagttgaacccattgctggattggatgatcgctttattaaaggagccgatatctcgatgttgccagaaatcgaggaaaacggcgggcgctattatgccgatggagaacaaattgatccactcgtgttgttaaaggaaaagggcgtaaatgctgtccgtatccgcatttgggtagatccttacgatgaaaacggcaacccgtatggcggcgggactgtgggtgaacagcgcgccgtcgatctggcaaagcgtgcccataaccatggttttcaactgctgcttgattttcactacagtgatttttggacagacccagggaagcagtttaagccaaaaagctgggaacattacagttttgaggaattaaagagcgctatttatcaccatacatccaatgtgcttggccagttaaaggatgcagggatcattccggaaatggtccaagttggcaatgaaatcaatgccggaatgctatggcctgacggcaaaagctggggagaaggcggcggtgaatttgataggctcgccgcattgttgaaagcagggctcactgccgtgagagactgcgacccgggcattcgcacgatgcttcatttagcagaaggcggagatatcgatatggcccagtggtggcttgacgagatcgtgaatcgggacgttgattttgatgtcgttgggttgtcttactatccttactgggatgggaatttcagtaagctcaaacaagtaatggagcttgttactaacgattatggcaaaggcgtcaatgttgtcgaaacagcatatggctttacgacggataatggcgacaacttagataatattttttcaaatgaatacgcacagctagtcggttatccagcatcaccgcaaggtcaagcgtcttacttgcgtgatttgatggagacgatccatacggcaggcggagaaggcttctattattgggaaccactttggattccagtgtctggcgcctcttgggcgaacgaagccggaatgcgctatatccaaacagaaggagaagtgggcaatgcctgggacaatcaagcgatgtttgattttaatggcgaagcgttgccttcgttagatgtgttccatttagtaaaccaatcgagatgatgagcagagaaggagtaggagaatgaaatatccaccagtacacccaacagtggaagggatgatgcatggcggcgattataatccggaccaatggctacacatgccagaaatcattgaggaagatttccgtttaatgccccttgctcattgcaacacgttttcgattaatattttcggctggagtgctattgagccagaggaaggagtctatacatttgcatggttagatgacattatggactgtcttgccgaaaaaggttaccatgcgatcctggctacgccaagtggagcgaggccggcatggctgtcaaaagcctatccggaagtgctccgtgtcgaagcggacagacggcggaatttgcatggacagcgtcacaatcactgtttgacttcccctgtgtaccgtcagaaagtcaagcaaataaaccgcaaattagcagagcgctacaaaggccatccggctttgaaaatgtggcatatttcgaatgagtatggcggcgcttgccattgtgactattgccaagacgcatttcgaacttggctaaagcaccgttacgacaatcgtttggataagctaaacgaagcttggtggactggtttttggagccatacgtatacagactgggaacaaatcgagtcgcctgccccccatggggaatcgatgatccatggccataatttagactggaagcgatttgttactgaccagacgattgatttttatcgaaatgaaatcgagccgctccgcgagttgacgcctgaaatcaagatcacaacgaattttatgggcaattacccccatatgcgaccatttcttgggctgaattaccgaaaatttgctgatgaattagatgtgattagctgggacagttatccgggctggcacggagaaaggcaatcgaccgaagcacttgcctcagatgtcgcctttgtccatgatatctaccgctctttaaaaggcgggcagccgtttttgttaatggaaagcacgccaagccttgttaactggcatgatgtgaaccgcgccaagaagccaggcatgcatgagttatcatcattgcaggccgttgcccacggggcagatgcgattctctactttcaatggcgcaaaagcagaggctcttctgaaaaatttcatggcgccgtcgtagaccatgtcggccatgaacatacacgcgtttttcaagaagtcgctcaactggggcgaacgctcgaacagttggctcccgttgcaggttcgaccgtagaagcagatgtcgcaatcatttatgactgggaaaaccagtgggcgattgatgatgcccaagcaacgaacaatattgataaaggctatgcgtcccaagttcagagccattatcgaagcttttggaaacacggtgttccagtcgatgtcgtctcaatgaacgatgacatttccacttacaaaattgtcgttgccccgatgctttacatgctcaaaccgggagtggctgagcaaatcgaagcatatgtcaaaaacggcggtacgtttattgctacgtactggagcggcattgtagatgaaaccgatctatgtttccttggcggttttcctggcccattaaagcccgtgcttggcgtttgggctgaagaaattgacagtttgtacaaacatgaaaccgtaccgttcacgtggaatggcgatacgtacgaggctcattcatttattgaacgaatccatctaaaaggcgctgaaacaatcgctgcctttcaaggcggcagctcgccaacaccggctgtcacgaaaaaccggctaggcaagggaacggcttattatatggcgtcggctaacgaacaacgcttctatgatgctttttacgagctgctcattaacgaacacgggcttgcctctcctatcgcagcttctattccgacaggggtcagtgtgcaaacaaggacgaacggcgaatatgcgtatacgtttttcatgaactttagcgaagacgaaaagcgtcttacactaaatggagaaaagaagacgatccacggggaaacgatcaatcaagtcacgctccgtccatatgggtgggaagtcgtggtcgaagccatctaattgttaacaaggtcgacacccattcgcggcttttgagcgtaatacggcgtgtactacaccagagtacaaagaaccgcttgacatgatgctttcagaacgtgtggctcatttcaagtaaaccggaaaaacatacattcaggatcggtagccctccacggctgccggttttttttccttttgtatacaaataggcaattacggtttgggtctgaaatctaaattgggacattgattatttaatgttgggaaatatccaacatcgtctatactagtagtattatatattggtagaggtgatacaatgtcaataatgactgctgaaaaagctggggcgaaaattgttgagtggtatagttgtgtaattgctaagtctcatgatcaagctattttgcttaaagaagaagtcaagcaactcctaagtgagatgaaagacaatgataagatattggcctactattctttagttgaatttaggcatgacatgctgataaatagatacaacaaaaatgaattacaggatgattttcagaatattgaacacatagctaaaattgacaacatgctaaagtacctctattactttgttagtggtcaaagcgagtatgtcaatgaacgctatagatcagctattaagctttttaacaaagctcagcgcttgttagagtatgtgaacgatgaggctgaagaagctgagttttatcaatatagcggacttgtttattacagattaaaccaataccttgtagctgcttctcatattgaacatgcaaaggttatctttgatcgtcttgaatatactgagccatcattaaattgccaaattgtactggcgggtatttaccaagagttgcataaccctaaaaaagcagaggacatcttactagatggcttggaaaaggccacggacaatgacgtaatgcttgggttaatcaatcgatccttagggctaaataaacttggcattaaagattacaaccaagcagaattttattttagacaagctttatcttttaaggtgcacaaggatgcagcggttggagctaaaacaacatacaatcttagtaacgttcttttcaaccaaggcaaacatgaagaggcaatgaagcagtttaaagcggctcatgcaggcgctaaatactacaaaaatcatgaatacatggcaagatgtctggcaacagaaggattgcatatcaaaaaagattacagtttagttgatacagcaatcgatgacctcaacaaattaggcttggactttgaagtggctgaggtggcggaagaagcagctaattttgcagaaaaagaaggaaatgacaaattgacattgaaatatttaaagacagcttacaaagcccggctattccaaaatacgttaggagatgaccaacaatgaaaaagtttctagcacttagcgtactggttctaactcttttagcaggagtaaatagctttgcaacaggagaatttgagccgaatgataaagtagaaattagttaagaaacctgcctttagtagcaggtctttttttaatttcaaaatatcgtagtgttatttttctcttacgttagtaatacaggaagtataagtgatgttgtggagaaactggaacggaagagttttaatcatggtacaatccagaggaacagtaacacacaaaaaaataggtgggtttcagtaaggtaggatacattgcaatagcggtaggaatcatcttattgataaagggatctgaaactacaaaaatgatttggaaacaagctttatttctatgattgtttaagtattctcttaatcatttcagaaaatgtatgtattcgtaataagctcaccgtgtagagatacagttatatataaatttaatgtagattcgttctgtccatctttcctacttaactagatacatgttgtgaacgaaacttagaaatgtcctcactcgtatatataaaccactgttttgccaggcacaaattctggttcgcaatagactgaaatggggggatcggtttgaattttaaggtcgaagaggcgatcgagatacttgagcgtacgccggacacacttgctcattatctagcgggtttgtcagaagggtggctgcactgcgatgaaggggaaggtacatggaatgctgtagaagtagtagagcatcttattgaggcggaaaagcataattggctgccaagattagcttttattattcgtgaaggggaaagcaagccgtttcctgagtttgatcgtttttctcacttgcatcatgaaggcaaacgtccagcagcgcaagcgttggccgattttaaaaacgtgcggctcaacaatgtgaacacattgaaaacatggattgccgacggtttcgattatgaaagggcaggttttcatcctgcatttggccgcgtcaaaacaagggaattgctgtcgacgtgggtcgtccatgattttacgcatattgcccaaatagcgcgcgtaatggcggaacgatatagggatgatgtagggccttggcatgcgtatttaggtattttaaatagaaagtagcaagcagcgttgtgctgcttgctcaaccttcaaataaaccgctcgccgttgctgttactacacaaagtcagattggccgttttttaggaaatcgatcaaaacagcttggtactgcctaactgaatctgtatacaccatttcattgtcgccatgccagtcatagccaacggggccgaattcaacggcatttccgccgtacttcgtaaaaaattgcccatcgttggagccgtgttgcccgtaaagtgtcgccttttccaattgtgtttgtgccactaacgaatccgcgagcgcttggacaaatggattgtctgcttttgttttgacagggctattgcaaatatgtgtgcgtacgacgccgtccgtgattcctttaatttgccgcaaaatctcgctaggcgattggtctggcaaatagcggatgtccagtgacatgtcgcatcggtcaggtactttgttgtagacggtgcctccctgtaactttgcaaggttaatagacggttctttgaacatgggaggcgctacctcttgggcgaacggcaattcaagaatggcttcatagagtgcatgtgcttttaatatggcgttattgccttcccaaggacggctgccgtgcgcaggttctcccttgatgtgaatatcaacctgcaagacgccctttgactgaatggcgattcccatgtttgtgggttcgccgcagatgatgaaatcgcctcggtgcccttgttctactaaatagttggtgccgtaaaggcctcctgtttcttcatcagggacgatttgaagttggacgcgccaagggagaggcacgccgtttaactctgccattgtttccatcatcgcggctaaaccggctttcatatccgccgagccgcgtccatatatttttccttcctttgtgtatggtgtaaactgggatcggctgccttcaatcacgtcaatatggccattgagcacaatggtgttgctcccacttccaatgctagagacaagcatagaataaccgttgttaacaagccgttcgactggcagccctttgtcgttcagccactcttcgcaaaaagccatcgctttgttgactccggctttggttgaactatctatgcgaattaaatcctttagcaacgggattgggtcccccatgtttttcctcctaactttgcaaatagtatgatactcgatcaccgacttggatgcagttcagaaaatgtcttctcaattgggacaacgatgtcatggcgagcaagttcaagattgggccgtgttgtcagccactcctctttgacagccttccctgctgtaagggcaataatggcggatggaacatcagcaccagcgtggtgagaaaacgcataacctccgccaaatcgagggttgatgtcaatgacatagtaatcatcgccattgaaaaacacatcggcattcatatagccagcgtgacctaaatgctcgcccattttgcgggcaatctcgaccaactcaggttgatggacggttatgcaccggtctacatcgccgcctctcatttgcagttgtttgcgaataaacgacgcgcagaaacgaccttctaagtcattgaatatgtccaggctgtatttatcgccttcgataatttcctcaattaaaatgttattctctgcttctttcgcggtcgcatcgtctaatggcgactctttcaccgtattgacggcgtgttggtatgcatgttcaatgtcttcgattttatgtgccgtttccactccgattgaagcagagccgttgcggggcttgatcattagtggaaacgctatctgatcgttagcaagggcagctttcacggttgcgatcgagcaatatgattttggtgctttcacaccaatagggctcaacaattgccggtagttgcctttatcgcggacgctgtctacgactgattggtcaggggcaaaaacagcgactccctgttcttgaagttcctttttgtgtgcagctatttttggcacttcccaatcatttaatggcacaagacaatcaacgttgtgtttttggcaaatggtaagaattgcttctatataatgctcgtccgtttggtggggaatcacatagttttcgtctcctgcttgtaaagaaggagcgttgtaatctggatcggcaacaattactttcccttctatgtttgctttctttaaagcctcgtgaaagaagcccacaaaatcaattcgtctagcacctgatgtcaataatatattcatggcgattgcctccttcttgaacgtttgaaagttttataccccggatttcatatttaaatcatattgatatcaactcgttctttgatcatgggattcgttgtgactttgggactttgttattgcaaataaatggattgttggtgattcaatcatttttatgtattcagcgaaaaaggaagtttgcatgaaggatgctcgccaaggtttaaagaggggccatttgtgttaatcttgaccttggacgttactccaatgttatcgttgtactagagggaagggtggttcgtatgcaaatcaaagattttgcggacaaatatcaaatgcaagctgatacaattcgttattatgagaaacagaacttactaaaaccaaagagacgagaaaatgggtatcgggaatacgatgaagaatgtgaaaaacaactacagcttattgttgtattaaagcaactaggatttacgataaaagagattcaacaattgctgatattaaagggtaaagcaatatcggcggaatgtaacctttcaaccacatcgttattagaacaaaaagtaagcgacattgaggaaaaaattcagttttaccaacacgcattaaaagtattacaaacaattaaagaactaatagagggagagaaatatgcagaaaataaagcgatcattgaagaattgatcgtcgcgttctttgaaagcatgcaaaaaagggggatatcatgactgttcatcaaatcgtccgtcttgaaaacggaatggcctttgccctttgtttttatatttatatacagctaggctttcccatttggttgttttttgtccttcttctcgttcctgatatgacaatgattggttatgcgctgaatgaaaaaataggggcaatcgtttacaatgtcggccacagttttactctcccgctactgttcacactcttttcgttctatttttcaaacgattatctactacttatctctatcatctggattgctcatatatttatggatagactatttggctttggattaaagtatcaagagtcgtttaaaaacactcacatacaaagactgtgaactacccaccacttatcacccttgcaggtcgcttgaagtgggggcttcttgggtaatcgccccttttggtagctgacgaaatggaataagctaaccctcttgttccaagagtttatttattcattaggcagtggctaataagcgaattccttcttttttgatgttgactgctgaattgtagtctcgatcaaggcttcgatgttcttaccataccgtatgaaaagcttttcggcaatcacccaaccgatagtcatctcccttaccgcccagctacgccctacacgcttaaagaggaagacttctttcgaaaatatgttaaatggagacaaattgtgaatggagtgcttcaggaatggccaaaagcttgctcctctgacgaaaattacgttgactttttcgaattattcatgtatggtttatgagtaatcaagtcaaaataactggaggattgttaaaaatatgtatttcataagattgcgttttctcgttttgaacaagtaattttatatgttcaaagctctgcttgctcgcagagtaaacgggagcagtctgcccatttttaataattcttcatggaacaaatatgcaatagtgaaatgtgaagaaaggggactcgttctgcctttcttttttgtgtgcctaaacgttcgttttaggcgtattttggcaaacgtttgtttgcgaaatacgcttcgggcgtattcttgttctcgtttactttaagccgcagacgctttcgtctgcggctttttttgtgcaggtagggctaaaaaaatgaaaaaggggcgagtagccatgacgaaaaaaatgaacaagtataatgggaaaaaacttagccgtggagaacctcccaattttagcggccagcattttatgcacaataaacggctgctaaaggaaattgttgataaagctgacgtctctgttcgtgatacggtattagagttgggggcaggaaaaggcgcgttgacgacgattttaagcgaacgcgcggaccgggttctagccgtcgagtatgaccaaaagtgtgttgaagcgctgcaatggaaactagttgggtcaaaaaacgtgtccattcttcatcaagatatcatgaaggtgacgttgccaacggaaccgtttgttgttgtttccaacatcccttatgcgattacaacggcgatcatgaaaatgctgttaaacaatccaaaaaacaaactacaacggggggcaattgtaatggagaaaggagcggcaaagcggtttacaagcgtttcgccgaaagacgcttatgtgatggcttggcacatgtggtttgacatccattacgaaaggggaatttccagaagtgcattttcgccgccgccgaaagtcgattctgcccttgtccgcattgtccgcaaacagcacccgctttttccttataaggaggcgaaagcgatgcatggctttttatcgtacgcactaaacaaccctaaagcccctcttgatcaggtattacgcggaattttcaccgcccctcaagcaaaaaaagtgcggcaagcaatcggcgtcaaacctgagacgccagtagccatgcttcatgctaggcagtgggcgattgtttgtgacgcgatggttcggcatgttccaaaaatgtattggccaaggagaaaaaagtaggagagcatgtaaaaacgaatgaaaaatttgtgaggacatatagacgctgaccacggggatttgctacaataagatcaataaacgggcacggaacagggtaaaagcacgaaaagagaggcggccacctctcttttccattcgcttatgagttgctgctgttccgttgtccgcctttttgaccaatctcttggtagaattctttgtcatggttttggctagtcgtttgtccaccttttttgccaatttcttggtagaattctttgtcgtggttgttgctagtagcttctccgcctttttcgccaatttcttggtagaattctttatcgtggttgcggctagtggcttctccgcctttttcgccaatttcttgatagaattctttgtcgtggttgcggctagtagcttctccgcctttttcgccaatttcttgatagaattctttgtcatggttgcggcttgtagtttctccgccttttcttcctgcttcctcatagctcatttttccgttgtttccattattgttgcggttattgttttgtgccatttttaattcctcctttaagtagtgtggtatttgtatacctcaaagaaatcaattaaaacccccttgtttcattttgctctaattatcctaataaagtatctttcatttctattattgtatatttttgggttttgtgtaagtctgtcgttttaaatatcgggcagaagaatggtaggatcctacatagctggctgttttgtctgtcataactaacgattcattctgctgtaaacctgtctcattaggaaggaaatcgcttcttgtttcgcgaaagggtaatcgctaagacactatgtaaagagggtggccgtgttttggtgtgttttccatgtggaagacaaaaaacggatgaaaaattaacgaaagtgagtgtgtgaacaaatggctaaaatgctcattttgacaggggacgccgtagaggcgcttgaagtgttttatccgtattaccgttttcttgaagaaggatttgaggttgatatcgcctctcctgctgtgaaaaagctctatacggtaaaccatgatttcgttgaagggtacgagacatttgtagagaagccgtcttatcaattagacagccacattgcctttgaaaatgtgcggcctgatgaatatgcgggtttaatcattcctgggggacgggcgccagagtacattcgtatccacgagcacacggcagcaattgtcaatcattttcttgataataataagccagtaggagctatttgtcacgctgtacaagtgctagcagcagttgcaggcgaccgccttaaaggcagagccctgacagcgtataccgcttgtgagccagatgtgaaagcactaggcgccgagttccgcaaagaaactgtttatgtcgacggcaacctcgtctctggccacgcctgggatgatttgccacagtttatgcgcgagtttcttaagctgacgcggtaaagtcagcgcgttaacagtttgaggccatctctgtgcggagatagcctcatccctttcctatttaagcaagaagacttgttttagaccgaagctttttccagtgcgaaaaccgccattttcgctttgatcacttgtttgatttgttcattgcaaggaattaaatggttacgcaatgagtctgtcaaatcggcttttgcaaattggtgtttggctgtgcgcgtccaagcgattagcaattcagtgccgacgttaatctttacaatacctctggtcacacatttttggatatcttcatccttgacgcctgtgccgccatggagaactaaagggcgtgcatggttgttggcgatcgtctctagcaaatcaaactgcaaattggcttttgatttgtattggccgtgtgttgtcccaatagacaaagcgagtgcatcgacagtcacgtgttgtaagaactggctgacctcttctggttgagtgaagcttacttgcgtagaatcgatcatgaccccgtcttcggcgccgccgattatgccgagttccgcttcgacggagacgttgcgagggtgggcataggcactaacttctaatgttttttcaatattttctgctatcgggagcgttgaaccgtcaaacatcacagacgaatagcctgcatcgactgcctgtttgattttcgcaaaatctgttgcatggtcaagatgcaatgtaaccggtacaggaagttgctcagcaagggttttgacaacggcgacaaatacgtcatagcctacataatcggctgtgcccgttgttgtttggataatgatcggcaagtttgtttcctttgctgcatggagcatagctggaaccatttctagacaatgggcattaaaggcgccgacagcaatgcctcgttctttcgcgtaagcaagcgtttcttttaaattcgcatacatgatatttccactcctttattaattaaaccattccaacacatacccaagcaaaatgccaatcgtaatgacatcggagtcactaaacgtgacattttcaaggccgaatgacccgagaacagggattaatagagctggaagcaatgtgataaacagaccgtggacaattccgccaatcgctgcaccgcggaaaccacctattgcattgccaaatatgccagctgtgccgccggcgaaaaagttggtcagcattcctggcaaaatcattgctaggccaatgaccgggaagaacagcatgccgatgaccgtgccaatggtggtgaaaataaagccgacgatcaccgcattcggcgcatatgggaataacacagggcagtccagcgctggaacagaattaggtacaacgcgctgggcaatccctttaaaagctggaacaatttcgccaaggaagaggcggacgccagcgagaagtacgtaaacgccgacaacaaattggattgcttgcataaacgcgaagactaaatagtgcatcccgccggtatacgtttccataaaggctggtcctgcaaaaacggttggaatgaggtaaatcggaatcatgacaaccatcatcgatagatatgtgtcttgcagaaattccaagctttttggcaagttgatgtcttccgtggacttttctttgttgccgacaagttttgccgtgcctgcctggacaaggtagccgagtgtacaatagtgacctaatgcgatgtcatttgagcctgtaattttacgtacaaacggttgggcgatcgctggcataagcactgccattgagccagcaataacaccgccgagtataatcagcgtcaggccgcggagaccgcccatgtagccgacgacggagcaaacagtcgccatccacaatgaaccttgcccggttaaaaagatgtattttattggcgtgaagcgggcaattaaaaggttgacagcaaacgctaggaccataatcaaagccgtttctcggccaagtgtttgctgggcgatgccggcaatagcgcctacatcggtgacaatgcctctcatcgcaaacgcttcttggaagacgtcgcctaaaaactgcaaagtgcctacaataatttgtgtacctgccaaaaggacaagaaaaccgagcattgttttcattgtgcctgaaacgatttggccaattgattttttgagggcgatgaggccaatacaagcaatgagtgagactagaatgggtgcttgtgataagatatcgtttactaaaaaatgcaaaatctccattggggcgcctcccttttcatgattgtctcgttatagggcttgttttgcttttaggacgggaacaagcttttcttcaatttctttttgatcgacaagccgttttaaatagagaatttctgcttcaatttggtagtgttttaattgcgattcaaaattttgaccagtaattaaaatgtctgcccgttgactgcttgcggaagagatatcgcagtggttcagttttgcctcaactcctagtttttcgagcacggattccaccgccatctcacaggcaaaactgcttccaagccctgccccgcacaccattaaaatcgatagtttctttgccataattatccctccaattggatcagttggttttctttaaaagccaattgcagaagctctttcgccaaagtaggcgcttgttcaattgctgtaaggggaatggctttgacgcgcccttcctttaacgccacaagcatcgccttttcaccgttaagcaacgcatcgaccgcacattggcccatctgcttggccatcaggcagtcatagcttgtcgggtcacctgcccgttgtgtgtagccaagtattgagaggcgcactcgctttcctgttgattcctcaagcgctcgggcaagtgcaaacgacacgccctggtcgccagcagaaaaacgcttgttcaaatagatgccttcagatacgacaataatgacgctctttcctcgtgctgagcgggcatttacttctgtaatgaacttgtctatattgagctcatattcaggaaggagcacgatatctgcgctggcagcaacagcagcagcaagtggaagttggccgcagcgcccaccaaaggtttcgaccataaaaatccggcctggcaagttggctgctgtttggcggagccggtggagcgactcggcaatcgcattgactgctgtgtcatggccaatcgtgtattcacttccgccaatgtcgttgtcgatcgtcattggcacaacggcaactggcaagcctgcgcttaacgatcttgccccttgtgccgagccgttgccaccgcacacaatcagggcgtcgatgcagtcttgctttaatttttcgaggacacgcttttgtcccgcctcatggagcatatgtgtgctgcggccagaaaaacataacaactctccctgttgcacagcctccctcgctgttgttggtgatatggcgatagggtcctgctcaatgatcccgtcaaatccgccatgatagaaataaaggttaacatccggcgtttgggcaattgccgcaatggcaccatttagccctggcgcatcgccgccgcttgtaattaaagcaatgttacggaccgtcgacataggctttctccccttcttcgttgagaacgattctggttaacgattgcttggaggtggcggcttttattgcgtctagtcgctgttcgtcattaattaatttcacaattgaacgaaacgcttttaagtgtgaaaaactgtcagaagcggccaagcaaatcacaagaaataccgggtcgttatctggattgccgaatggtatcggctctgctagctggataaaactaacacttagctcatttacgccgtcttctggccgggcatgggcgatcgcaacccctggagcaaggacaatataaggcccgtattcatgcacagaggcgatcatcgcttctgcgtaattttttgtaatggcgccgcttctttctaaaggtttagcggccgcataaatggcttcttgccaattggcggcgcgaacgtttagttcaatatggtcttcgctcattagctcggctaacaatggctggatcactccttcgtagactggcaactgatgttttttaaatagagacgctaattcttccataaacggtttaagcatgaacgatttgctgtttgcttttgcaatttccacaatcgaacggaagaagtcttcattcgttgctccgtgcttctgccgttgcctttgttttgatttcgcgatttgcgcaatcgttgtttggattaaggctgtgtcctcatccttgaaaaacggggacacttgcaagcaaggcacacctttgatggaaaggggcaatgtcgttaagacaaagtcgacttgcaatttttggatgacatcgacttcataacgggataatgtgcctaatacttcaatggaagaaaagcgcgcgtacaagctttcttcgattaaacgggcatttgtaatgccatgaccgcaaataatgaccgtccggtacacaagcgtttgccgtttcagtcgttcagaggcgacgcaagtatgcatcgttaaataggcaatttcatcgattggaatcgttagttgcagcgttcgttccaattcatttcctgccatgcggcatgccgcaaataaatcagggtattgtttgacaatgacgtcggcaatcgggttttcaatcggcagctcgtttttaagtcgtcttgccattgtttggatatgggcataaatacttgaaaaatattcttggtcgtttacaaatggtagtcctgtctgctttgtgatggagtgcacaaagtccataacagcgacttggatttgcccccaatttccttccattttgaataagaattgctcttccttagcagtcgaaagaaatagcgataatacgtaaatttcggtgttcagctctgttaccggtttttgaaaatcaaatgtttgggcaagggcaaatgcttgtttgtccagctgttctgggaccattaccttctctgtcaataagtagcccattttgatgcgcttaagcgctagcaatgcatacaagccaatttctaaatgggtttcgtacgtaaaacggccattcttttgctgttcgattgtccgaatccatgccaaagtctgttccaacgcagtggcttccaccaatttacagcaataatcttcaaagaatgtggctgcttcgctttgtttcaacatgtccaagcctctattacggcaggcccgtttcaaaaaccggaaaagccagcgccgcttcgcgaactctgagccgacgacggcaaatccttctttaggcaaactgtctattcgcaagttgtcagcaagaagctccgtccgcagccgctgaatgtctttgtctactgtgcttttactcactagcaagtgctcgcaaatcgaagggacagtcactttctcctcggcgtaaaagaaagcgaatacgagaaaagcttcgcggtcggcagcatcgggaaaatggagtgtgtcagaaccaagaagcttgtggagcacctcttgatcgcagtcataataaacgccttttttccgattgcgcttaagcggcggctgctgatgatcccttaaataatcatcgatttcctccagggcataacggattgttcgcgcagagacttggaatgtttcggaaagcgatttaacgggcacgtagcccttatgcctgacaatttcttggaagatttctgcatgtttgcgtttcattcgccaccctcctttggcttaatcatatgttaccgctttcacgatttgaagcttaaagttcttccattttaagcggaaaagaagtaggcggctaaggcggtcagagaaggaaatgtaggtgttttttgtatgaatctgagagtgtgatgatcagtttgttaaaaggagaaggggaaatttacgtatttattaaagaagaaaaagcgaaagggtttaagcttatgaaaaaacggcctccccggatagggataaagccgttttaactagcaaaatgcaaattaaaggttgtctggatacttctattctccgtggttgagtaaataagtagttgttaatagtgatagccagaattaatactcacatacttctaaacaattgccgtccaaatcatagaaggcaaaataacgggctccatattctttaagttcttctacttgaacgccattgctttttaaatgctcatacgcgctttcggcatcggcgacatagaaattgaaggcgctccgtcttggctgaaaataaacgtcctcgtctgtaagaaataacgtaatcgatgtatcgccaaacttaaccgattggtactccccttcgtctcctttccaacctggaacgccccctaaaatgtcggtataccatttaaacgcttgatcgatattgcgagtaggcacaaaaacggtgtcaattcgtttgaaaatcgctgtcatggctaagcctcctttaatcgatgtgcgtatttgttctacagtcgctagaaaaagccctctttttaatgaaaataattgctttcttactattaggaacgtctcctgccttatttgtagtggcaactaagcgctgtttactagcgattttacgcatatgataaaatggaagcgtgctttatataattaaaagaaacaagaaaggattaggattttgaggttattggaattgattcttgtggtgttggcaatcgccgtgtttttatggtttgttgtcagcaaaacgaagaagcagaaaatgattgttattggattagcagccctctatatagtggccgtgctgcatgtgatggttgaagggccaaggtggcaaatggtgttcgcctacttggtgccgtttttgttgacgattggaatgttgtttaggaaacaaggaagaagccaaaaccgtcttttgcgctggggcgggtatgggctcgctgctgtctatgggctggtgatggtggcaacccctttgctgttgcctgtcttttcatttgaaaagccgacgggcaagtacccagttggaacagaaacattttatctaaaagatgagaacagagaagatgcgcctacgattgcaggtgggcgagaactgatggtgcaagtttggtatccgagcgagagccaacaaggaaaacgggctccctatacgaaagacgtcggaccgattacggaaggattggaacaagcactgtcaatccctgcctgggtgttaagccatcttcgttatgtcgatacttacgcaacagaaggcagccaagtttccgaaaaggccgatacgtatcccgtgattgttttctcccatggcatgacagggtttcgcaaccaaaatacatttcaggttgaagagttggcaagccatggctatattgttgtaggcattgaccacgcttttgatgctgctgcgacagtctatccagacggacgcagcgttttgctgagtgaaaaccaattgactggtttcgaacagttggatgcccatatgaatatttgggtaaaggatatttcgtttgttttagatgaacttgaaaaatggaatcgctcaggtactgatggcaattttgaaggcaaactcgatttagaaaaaatcggcatgtttggccactcttatggcggggcggcagcggcgcaaatgcttgctcgcgattctcgagtaaaagtagctttaaatatggatgggaccttatatggaagcgagcctccggcaaatggatttgccaagccttatttgcaaatgaatggcgagaaaagcattgataaagctgcctttgacgctaaattggaccaagctgtggcgcaaaccggaaagtcacgggcttcctatgaagccttttgggacgaaagccaaacacggcgggaaacagcgctccatggcggtgggtatacaatgacgattccgcacacgtcccatatgagctttacagactttcacttgttttcgccgttgcttgaaaataaaggggaacagattgaagaagtccaccatcttatcaatgacgtgagcattgccttttttgacgagtatttagcaggaaaagcaacagggttgttgcaggaacaagcgaataaacatcctgaagtgggccttgaagccccgtttgctccttgacagagggaagtaggtaggaggaaagccagttgagagaaactcaactggctatttaactgccccacgcgttacgttgctaataatccaacgctgggcgattaagtagacaatgactaatggcagcatcgccagcaaataagaagcgaacgccaaattgtaatttgtgctaaattccgattggaaaatgtactgtgttaatggcaacgtggcgtcggctggatttgtcaggatcacgagcggcaacaaaaaatcattccacgcgtataaagcagtcaaaatcgcgactgttgcattcatcggcgccagcaacggaaaaatcactttccaaaaagttccccaagcgctggcgccatccataattgcagcctcctcaagctcaacaggaattgatttaatatagccaacgtatataaatacgttgaaagacagttgaaacacgatgtataggcagattagcccgaatacattatccatgttccaaatcgcggtctgccgtacaagaggaagcataatgatcgggaacggcacgaacatcgcactaacaaagtaataaaacaaagctttaaaaaaccgtttgtgcatattacgggcgatggcgtacgaaacaagggaattgctgagcaccgttagcacgacaacggctgctgttaccgtaaagctattcgacagggcgttaaaaaagtttgttaattcgattgcatctagaaagttttgaaagcgccattcctttggcagtgacaacaacggttcgcccatttctgctggcgtctttaaagcaatgttgatcgttaagtaaagcggcaagagaataaacagtgaaccgagcaaaagcagccctgttacaagccagtttgttttgttttttttcattactgctgcacctcccgtttctgcaagatccggagctggaagagagacaaagcgacaatgataatgaaataaatcacagcgttggccgattggtagccaaactggcccccttggaagccgccgcggtagatgagcaccgaaatcgattcggttgcatagccagggccgccgcctgttaaggcgataatatggtcaaataccatgagaaagtttttgagtgcaagcaccatattaatcgtaaaaaaaggagcaatgatcggaaaggtaatgctccaaaagcgacgccatgctttggcgccatcaattgcagccgcttcatatacatcttctggaaccgtctgcaaccctgctaagtaaagaatcgtattaaacgcagttgcttgccaaacggccatcacgacgatgccaatccatgcgtaatcagggctgccaagaatgttagtagacagagtgcttatgccaagcatgtctgccaattgaggcaaaaatagtgtaaatataaattgaaaaatgaatccgacgattaaaacgcttagaatgttaggcatgaaatagatggcgcgcaatgtttgtttacatttgatttttgcatgtaagcccaaggcaattgccaggctaagaatattgaccaggatcgttgaaacaatcgcaaattggaatgtaaacccgtacgcgctccaagcacgcatatcgttaaagacatttatataattggacaggccgacaaagtcccaatcgccatagcctttccaattggtaaaactgtaaaacacgccttgcaaaagcggaaaggtatggaacaagaaaaagagaagcacagcgggaagggtcataagcaaaaacacccgttgttttgttttcattggtggctcctttctagtaccgcagttgggtttggtcccattcccggtccattcgtttcaagaaatcttgttcatttcctctgtacataaactcctgtatcatattttcaacgcccattcccggcaaataaaaatggtcaggaaaactcgcaatatccccttgtgcaaaatgttcacgaattccctccatgtaaggatcgtcagtgagaacgccttccaacacagaaaacgctgattgttcagccatatattgctctgccggggcttcttctagcatgaatgagataaacgcttttgcttcttctgggtgattgctgtctttaagcgttgcaaacaggacatcgacgccagaaacgagtttgttttgctcagtgtcatcggtgacggggagtgggaagacgcctaaatccaggttaggattggttgtcaacaattcaggtacagcccagttgccttggaaatagaagaggccgttttcttgagcaaacgcacggttcccatcatcgtaaccaatcccgtacatgcggtcgtggccataatcaagcaatgtttgaatcttactagttacttccgtatgtgtagcttggaatgtgagggagcctgctgttttttgagcagcaaattcgtcaggctggagaacaccggcaacagcattccaaaggggcagtgcagtccaagcatcttgtaacgtatagtaaattggaatttcgccagcctgttttgctatttctaaagcggcaacaaactcctcccacgttgttggcacatcaaggccaagttcctccaatttcgttttgttgtaaatgaccgtattggcgttcgcggcaaacggcacgccgtagataccggtttgctttggcccttgcagctcttgtaccatttctaaataggctggctggataccgtccaatagagacgtctcttcataatcaacgagcaaattggcttgcgccagttcgccatatagggcatttccgccaatcgccaatatgtcgggcatgtcatttttgacaagccgtgtacgcagcaacgtctcagcgtcaggaggagcataaaggttaatgcgaatgccttcgtgctcggcttcgaattggtcaattagcttttgatacgtgttgatgttttccgttttgttcgaaaacaattcgagttcaacaaccccatcgctagaagactcgccgttgcagctggccataaacaggagagacgtgaacgccgagaatatggtcaggatttgtttcatggaaaacgactcctttcctaataaaaaaacaatagatcgatccttttcgcgggcgagttaatatctttctccgcaaattatagtaaacgtttacgttagcgtcctgcgtgggagtaaacgttttcgtattcattatcatttccgcaggtcagattgtcaagtatgttctgaaagttgtagaacatgcaaaacaagcacgcttgcttttgacaagaagaaatcaacgatcggtgcgtttgctaactcttacaattttgtcatgtacgctatttcgtttgtcatctaaatcaaaggcaagtgtgcagcttcctcagtaaaatgaaggtacttaagaaggaggaagcagtccatggttgtacttgaagcagcaaatatttgcaaacaatacggaaacaaatggaataagcaagaagtgttgaaaggacttgacttaacgattgaaaagggcgagtttgtgagcattatgggggcttcaggctcagggaaaacaacatttttgaatgtactgtcgtcaattgaccaagtgacaagtggaacgatcattatagatgggaaagacattaccactatgaaagagcgggaacttgcttggtttcgccaaaggcatttagggtttgttttccaagaataccacttgcttgagacgcttaccgtcaaagagaatattctgttgccattgtcggttatgggggcaggcaaaaaagaagcagacgaagcgtttcggtctgttgcggcagaattaggcatttacgaattaaaagacaagtaccctaatgagctgtctggtggtcagaaacaacggacttcagccgcccgggcatttattcaccaaccaagtatgatttttgccgatgaaccgacgggggcgcttgattctaaatcggcaacggacttgcttaataaactcactgaatttaatcaaaaatacgaagcaacgattttaatggtgacgcatgatgcagcagcagccagttttagcagccgtgtcgtctttattaaagatgggcaaatgtttacagaagtgatgcagcaagaccggacgagagaagaccattacgaagaaattatgaaaacccaggccattcttggggggatcaaggcatgaatacaggccaactgatcatgcgcaatttgcggaaaaacagcaaaacgtacggattatacattttctcattaacttttagtgcggcactctattttgcctttgtgacgttgcaatatgatccggcgcttgacgaggcggctgcatcggtaaaaggagctgctgccattcagtccgcatcagtcttgcttatcgcaatcattgcgatctttttgctctatgccaatcgtttgtttttaaaaaggagaagcaaggaaatcggtttatttcagttggttggcatgcggaaaggccggattttttgggtgctgtcaggggaaaacgtgctcgtttactttggtgcgctagctgtcggcattttcattggtttttatttgtcaaagctggcaatggtaagtctgtatcgcattatcggtgtcgaaatggccgcgaaactgcatttctcaggcgctgctctaacccagacgctgcttgtctttgcggctatttgcgttctaatgatgggattcacgtatgtctatatccgcaagcaaacgattttgtctttgttccacatcaaaggcaaaacagagatggtcgcacaaggattgcgtgcatttgagatcgcatttggcgtactcggcattgtgttgattggatttggctattggttatcctctaaattgtttgaaggacaattcgtcacacagaatgaattgtttttggcgatgacgaccattttggccgcttgtgttttcggcacatggttgttttataaaggaacggttagctttgttgcgaaagtgattcgccgcaaaaaggatggttatttgaacattcgcgaagtgatgtccttgtcggcgctcatgtttcgaatgaaatcaaacgctgtgttgctaactgtcattacaactgtctcggcactagcgattggactgctgtcattaagttatattacctattattcagcagaaaaatctgccaaacaatgggtgccgactgattttgcttttacgagtgtggaagatgcagaagcatttaaaaacaaactcgatcaaaccggagttgactatcaagaacgtacgactgaatttatacaagggaatgtcaatgtagaagggattattaattcgtcgacggaaatgatgaccgggacagcacaagaaatggcgatcacaagcgctgcctatatgacagatgtcgatatctcccctgacgaagcggtgttaactggttccaacgacttgctacagcggttcgtcacgtttaaagaggaaggcgaaatcgtgattgaacttggggaagagacattaagccaacactatcgaggcttaaagaaggaatttgttctcccttctttctataaagtagcgggaggaatgccgactgttgttgtcaatgaagagacgtttgtttcactgaaaaagcaacaagaagcagagacatcttatggcattgatattgtaaaagaatcagaagtagttgcggcgaattcagcttatcaagaaatggattttcaagaacaaagtgagtcacaatgggcgatggctacaaatcaaaaagcccatatgggtttatacatgttcattgtcgctttcttagggctaacgtttttaattacttcaggctgtattctttattttaagcaagtggatgaaacagaaggagaaaagcaccattatacgattttacgcaagctcggttttaaccgtcgtcagctggaaaaaggcagctatggcaaacaattatttgcgtttggtattccactccttttaggcttgtcccatagctattttgctgtacaatcaggctggttcttttttggcggtgaattgtggacgccgatgctgctggtcatggctgtttatacagtactctattcgatctttgctttgctgtctgtatcgcatacgaaaaaagtcataaaggaatcgttgtaaccaacacgaagcggacaagcaaacgttcgtcagagcgctcgcgttgtccgctatctttagtggtgaaacacctttttaatagccatttacatacatgtcggatatgcttggcgcggatcattagttgacaatgccatggtaaagaatttccgtgtccaggttaaccgaaatcggtatttgcggatataattctttccaatcggtgttttgccaatcgcggtaataaaaagcacgcatatgtttaccaatcccgtaataatcgcagtttgctgcttgaatgatttggatcacttcttcgcactcttttgttaattgcgcggtaatgcggttattcaaatcatcgacattctcttgaatgtaaagtgagtctttcgggtattcaatgacatttaaagtcaatttcacatcaaatccgacttggaattggccagcgctgtttttcgttaatttcatgttcgatttgcggtcctctatatctaccgttgcataattgttcgcttttatcgcattgtcattgcttactttgatatttaagcgcggttctttgtcttgtttttgatctaataacaacaagcgcaatgtttggtccgcgcttaattcacctgacattttgttttgattaaacaaagccaccccgtgcaactcaatattatggtggtccattacatgaagaagtggcaaaacaaaatcggtgcctttatcaaagagtaaggaaaggatatcttctagcgaagttgttggaatattccctgtgttttctaagccgtagagcaggtcccctaagtaattgctaataagcggtgtttctgccgtttttacatggagggcgtctttagctggcccattgacaatactgatgcgtgcattggtcgtgctaacaggagagcggtagtgcacatcaagcattgagtaaatattttgttcggccagtcctctgcttaataacgtgacccggtttttggaggcaaacaaatcgcctgacactttcctattcaattggatgcggctgtcccgtggagtcgtcccaacggctgagataatcgcgggcatcgtcgaagtgcctaccgtagctccagactggttttgtgtgccagcaccgattgttacaatcgttgtttcaatttttccatcatgcgtttggtcgagtgcttggctataaattaaattaatatctttgacgagccgctggtcccaacagcccgttaacaggattagcataaggactgcttgaatcgctttcacactttcgacctccttttaaagacgatagcaattagaagcataagcaaaggaatggcagcgttcattattgtaccaaactcgtctgttcttgttatcatttgtctgacttgatacatgctatcaggcatgagattcactagaaaggtgatgaggaaagctaggacaatatacaaatggtaacgctgagagcggaacaatgtcatcgtaccgatcaccccacaataaacgtaaatcccataagtcgtaatcacaatgaccgaccaaaggcatagaaaaatcaaatcgatccgctctacaattggaaatgaaaacgacttgattaaatagagaaacggttccggcaacagcttcagttctccagcgctaaatgacgtgtaacaggcaacgacaacaattaaataaataaatgtaacgacccaatgagctagtgaaacaacctttattttctcggcggcagtcgctttcacgtatggaaaaatcaagctcatgacaatatagccattaatggcgaaagaagcagccaacgtccctttcataagccccttcggttcagtaacgccgatcggcagcaaatttaaaaaatcggcattatgaaaaaaaccaccaatcatgacgattgggataaggagaatgagcggagcagtcaagacaaacatccgcgctttttgatcaagcgtacttaataaaagtggcaaacatgtaatgataatcaaggccataaaaacaggctcaggcgttttggttaaaatccaaataacaatgagttgcgtgaagtttttcaacacaagcgctgccgtataaataaaataagcaatgtagataagagtgaggacttttccagcaaaaacgcccaatattttttcgcaaattgaaaataaatggtcattggggaagcgtttatggagcagccataggacaaaaatggcgatttgcactagaatggccgaaatcagcaaagaaatccacccatctgtttgcgcttccttgtaaagggagtatggcaatgaaagaatgccaattccaatttgtgcttgtacataaaaccaaaacaactgtgttttccctaaacgtttgttggtttccattgcgtatcatcccccctttcgtgactcccgttttgaatggggagacgcataacgggtatgctgttggatcaaccaagttgggaaccgcagcaaaccatctttgacgcctttaagacgaaaaggcgcaagcggcgaaaagtaaggcaccccatatgaatcaagtttgacaagatgcatgagaatagcaaagaaagacaagatgaccccgatcaaaccgaaagcagcgcttgcgagcatgagcgggaagcgaatgaggcgaacgactgaactcatttccgtgttcggaatgacataagaagcaatcgcggtaatagcgacgacaataatcatcatattggacacaagcccggcattgacaacggcttcgcctataacaaggcctccaacaatgccaatcgtttgaccaattggcgccggcagccttacacctgcttcacggatgagctcgatcgtgagttccataatgagcgcttcaacgagcggtgggtatggaatattttgcaaggagcttttgacagaaataatcaacggttgcggaatgatttcaaaatgaaacgcaactaaggaaatatacaaagatggcacaaagacagcaatgcaaagcgctagcaaacgaactgagcgcaaaaagcttcccaggaaaaaatgaaaattgtagtcatcaacagactgcaaaaaactaaaaaatgaaacaggcaaaatcaaagcagtcggattgccttccattaaaaccgcaatccgtccttctgccatatttccagcgacgacatctggccgttctgaataaagaacttgtgggaaaatcgaccgttttgactgttgcagcagctcgtttaaaacaccaggcgaaatggtgatatcttggttaatcgcttctagctttttcatcaattctgctagtacagtagcagaagctctgtcgtgcatatagacaacagcgacgtcttttttaatcgtttttcctatcttttttttgcggacgatcaccttatccgtcgcagcttgcctgcggataagatgaagattgactagaaggctttcaataaagccctcatgtgttccctggagggcgcgctcatttgtcggttcctctatgctacggtttatcgataaggctgcctctaccataaaaaaagacgggccttggtcatagagaacaatagcagcttgccccttataaagaagaggcacacattctgcaacagtcgctttttttttcaaggaagcagaagcgagcgcttcttggagagaccgctttgaggcaggggcctgattcaattgtttaaaaataatattctctagccatttctcatcaactaatgaatctaaaaacaagacaaacccgtgcaagccttggtaggtgaattcacgaaaaacaagatcatctgtgccatgcacagctgctgttaatttgtttttaatctctttaagttcgctcatctaaaccaccctctacttgctaataggcttactatttcctaagagtggttctttatacggcagccaaggtgattttagccataacgatgccattgtttgggcagcggtgcgttgaggagtgaagaatcgactgatcgcttcgaggattgggtagcgcctgctttttataaatctaaataaaaggataaatgacgtgattgtatgctattaactgggtttcatactctcttttttactatatacattcatttaaagggttaaaatgtatttttactaggccttagttcttaattgtttcttcttcactggcagtttatgctccttttctttgtttattttaattaaacggaagaaggcgaatttgaaaaaagggttgattgcgactgtcatgttggcttatagtggttactggattgattggcctcattttacaattggggaaatgttggacgttttttcagtgtctggcaatacaatagtatggatggtgccaaatgatggaggaggattatttgtgaataaaatgaaatggtttttgcttgtgcctttcagcacgcttgcattagcggcttgtggaagcgacaatacaagcggtaacggtggacaagaggcagaagcggaaactgaacctgcagcggaaacagaagagctaacggctgaagacgtattagtaaaaacaagtgaagcgatggaagctcttgatagttttcgtatggaaatgtcaatggattatgggatggagtacgagggccagccgtttgaaatgtccattggcatgacggctgatatgattcaagagcccctatcggcttatttgagcacgactatttccgattcagaaacaggtatggattttacaacagaccaatacatggttgacgatactttttacatgcaaaatccacttggaccagagtggatgaagtatgatatgagcgaagatccagcatttgcaacagaaatggaaatcgatacgcaagaacagcttgacgtattgaaaagcgtcgcggaacatattgcccttgaggaagaggaagggtcgtatgtcttaaaagtagacggatcagatgaagaaatgaacgcattggttcaatcttttatggaaatgggccaagaaggcgcgcttccaactgaagaagacatggcattaatggaaggctttggattaaaaaacgttacctacacgatttatgtcaataaagagacgtatcttcaagaaaaaatggtaatggattttgagatggcttttgacgatgaaagcgaaagtgaaagctttagtatgtctggtactgccgaagcaacttactcgaaattcaatgagtttgacgagattgatattccacaagaagtgttagacaatgctgttgatggtgcagaaatggaagcacaatgggaagctgagatcgatgcccttgaagacattgaaggcctcgaagatgttgaagggttcgaagaaattcttgaagatattgaagaagagaatggcgaataatcatttgcaacaacacgcgtccttttgatcaagggcgcgtttttttatgcccactttttcaaaaaaaagcacactcattagccactatgtttaataattgccctatgagggttaagaaataggaggcaacgaataaagcaagcgttgctcagaaacaacactatttaggaggttttcattatgcaagaaaaggtagatctctatccttcacgcgttaaggagaccgcaaccattatggaaagaaaagacccaatcgtttattcaagggaaaaagggccgcttgatcgtgaggaattggctttttatgaggcaaatgggtatgtaatgttagaacggctttttcaagaagacgaagtgcaagtcatggctaatcaattggatgaagtgatgaaacagaaccaagagcgggacagtgatgaagtcatcaaagagcctgatagcaatgaaattcgctctgtgtttgaagtccacaaagacaacggcttttttgaaatgttgtctaaacatgagcgcattgtggccattgcagaacaactcctaggcagccaagtgtacatcaaccaatcgcgcattaattttaaacctggttttaagggcaaagagtttttctggcattctgattttgaaacgtggcatgtggaagatgggatgccaaagatgcgggctgtcagctgctcgattatacttacggataactatgaatttaacggaccgctaatgctaatcccaggctcacataaatggtatgtttcttgtgcgggcacaacgccggacaaccattacaaatcatcgttaaagcaacaagttgcaggaacgccagaccatacaagtttgcaatggctgactgaacaagcgggcggacggattgaccgtgctactggcccagccggatcggtgctattttttgagtgcaatacgatgcatggctccaatgccaacctttctccttacccacgcagcaacgtctttttcgtatttaactcaattgagaaccagttgcaggcaccttactccggaaaacaaccacggcctgaatttttagccaaccgcgacagcataaccccgattcaacctgtgaaagatagcattgccccacatgcccatgcaactaaatgaaggacagatctggattgaaagtaaccgtagcaatatgaaagtggtggcaatcaaaaacgggacgagcggctttatgacgtttccaattacaaaccagccacttttgtgcctgcttgctggagtacacggatggccaggggaaaaaacagcgttaacagcccatagtagaatcaaaacacgaacagtgcatgagcctgttcgtgttttattgtaattagaatgagaagggggacgcgcattcgtcaggaaatatgctatatttattgataatgattatcaattaattgaggtgtgtgcgagtgagagattggaaagaagcgctgatccgtttggaaaaaacgacaacaagcactgtctctctggttcatagcatggcatacgcggacacgtatatgctttgctttgtccagtccggttctttggcggtccaggtaaacgatacaaaggcatcgctgtccccctaccatttttatcttttaaaacctggggatgcctaccattttccaggcgaaggcgcggaaatcgccctcttttgtttccgtatgtatgaaccgagagagaatggggagttgctgcaagcgacaaattggcattttccaagacgaaaaggatgtgcaaatgagaaaacggcagatcttgcagctgctcttttgagaaaaaacaaatatgcgtttttctggaatcaagtccaatttccagacttgttataccgctgtctggaagaaggcagcaatatctcgatgagcggaattgaattggcaaagcaatatattgaagaaaatccccatgcccgtattagcttaaaaacgttggcgggattatcaggcctccatccgtcgtatttaagcgaaaagtttgcgcaacaaacgggcaaaagcgtgtcacaatatgcagcggaagtcaaattaacggaagcaaaacggcttattcaaacaacgacgttgccccttaaagacattgcacatcggatcggctatgacgatgaattttattttagcaggaagtttaaaaaggaggttggcctttcgcctagccagtatagagagaagaaaatgcggaaactggccgcctacgatcttgattcgctaggtgatttgcttgctttgcggcaaattccatttgctgcgccgatgcacccgaaatggacaaagcactattatgagctgtaccagcacgaggttccagtccatttgagcgcttaccgggcgaatcatgattggcaagcaaatatggaaaggctgatcgattggaaaccggatgttttatttgcgaaaaggaaactccatgaagaagaacggaatgcctttactgtctccatccctacttttatagaccttagcaacgctggaagttggaaagaccagtttatcctcgtcgccgaagccttacatgaacagaatgaagcacagcggtttcttagccattatgaagaaacagcagtcgcttgcaaacaatcgattgaaaaagaaaacacgggcagtccagtcattttgcggattgcaggcgaagggatttatttatatacaaacccaggcatttcaagtttgtttcatgacgttggttttgaaggctggcagcagtcggcagcaccgttgtctttgcttgagcttaaagaattggcgccgagatggttgtgggtgctttgcctccatgacagccaaacaaaggctttttatgaacatgtccggcaaagtgaagaatggaacgggctgcctgctgtaagaaccggccaagtcaaacatttgccttctgatttgtggttcgaatactctgcctttgcccagtggcgcaagcttctttttctccgctcccaacttcagtccatgtaattgctgaaaaaattccatgtgcatatacaagttgtccccctatactaaccaatagtgataatcgttctcatttaattgacgataaagaaaggggttataaacaatggaaaaagggtggttaggggcacttgccttggcgagtatagctgcattaacagcatgtggttctggagcagagggcagtggtccagctaatgaaggaacgacagagaacagtggggaacaacagggcaatggcgagcagacgctctcgtaccttggccaagactatgtgctgccggaaaacgtcgagcgcattgttgtaacgggagcgatggaagctatggaagatgctcttgttctcgatgtagagccaattggcgctatgaccattggcggtgcatttcctgacatgtttgcgccgattacggggcaaacagaaccaatcggggaaaagacggagccagatgtagaaaaaattttggcgctcgacccagatgtcatcttggcttcaacgaaattccctcctgaagtcattgaagagcttgaaaaaatagcgcccactgtgcaaatttcacacattgcaacagactgggaagacaatcttcgctttttagcggagctaacaggcaaacaagaggtggcagaggaatcgattgccgcttactacgaggaactggaagaggcgaaggcagtaattggcgattcgttaaaggatcaaacggttttagccgtccgtgtgcgaaataacgatctttatatttatccgcataccgtatttgtcaatccaattctttatgaagacttaggtattgaggcgccggaagtcacacaagctgccgaagcacaacaattgatttcaaccgagcaacttgccgaaatcaatcccgattatttgtttattcaagatgcagcacaagagaactcagaagatgaaggggatttgcttgaacaactgcaggatgacccaattttgcaaaatgtccctgcccttgctgaaggacggacatttgtgaatgttgtggacccattgtctgaaggaggtccgtcttggagcaggatcgagtttttaaacgaggctgttgatctccttgtcgattaacggcgacgccttccgaccagcaaggcgaaacgcaatagttctcgccattgggtttgtcgttctcatagcagcgatcggatggtgttcacttgccattggcgcgaagtcaatggagtggcgcacggtcatacaagcgctgtttcagtttgaccctggcaatacggaccatcaagtagtatggcgtacgcgcttgccacgctttgccggagcagcactcattggcgccagcctcgcggtctcaggggcgttgatgcaaggcattacgcggaactatttagcttccccgtccattatgggggtaactgatggttcgctgtttatgattacggtcttaatggtatggcttccgggggcgtcggggctcgaaatgatcttgttttccctagttggctctgctgtaggagcaggggcagtttttggggttgcctcgctcttgccacatggtttttcccctgtccggcttgcgattttaggaacgattatggggacgtttttaggaggagtcgcccaagcgattgctgtctatttccaagtctctcaaaacgtgagcttttggtatagcgccaggcttcatcaaatggaaccatctttactggtgttggcgctcccattctgtgtcgtaggcaccctattagcgctgtctttggcgcggcaaattacagcgcttgctttaggcgatgaagtatcggcgggtatcggacagcgcactcgcttgattaaacgtttagcgtttttagccgttgtcattttaaccggcatatcggttgccttggcagggaaaattgcttttgtaggcctagccattccccatattgcccggtttctatttgggtatgattacagaaaaatcattcctgcatctgccgtattaggagcgatgtttttgcctctttgtgatgtagcgagccgcctcgtccattttccgtttgaaacgcctgttggcataatgacatctttcgttggcgtgccttttctcttgtacttaattaaaaccaaaggagggaaaaggcatgccctctgatcgaaagcgctttggattgtttctagttggggcagctacactgctcatcgtcgccgtctatcttcatttaacgagtgggtcatatgagttaacgcttacggaaacgttcaagacgttatttcggcttgaagaaaatacgcgcttcgaccttgttgtctttgaattccgcttgcctcgcattgtaattggggcgattatcggatttgggcttggctttgcaggggcaattttgcaaggcatcacgcgaaatccattggctgacccaggcattataggcattaatgccggggcaggggcggctgttgtttgttttatgttcttctttcaagggcagctgtctactgtcaattggctaagcgtgctggcaatgccagtatttgcctggtgtggcggtttgcttgccatcgtttttattctcgcatttgcaatggaaaagggccggctcgatccgcaaacatttatattgacaggcatcgccgtttcggctggatttggagcgctcacgctgtttttctcacttaaaatgaatcctagagattacgaagcggctgctgtttggttggcaggcagcgtctatagcgccaattggaaacatgtcgtcacagtgctgccgtggatttttttattgacgcctgctgccttttataaggctagagttctcgacgtacttggcttagctgatacaagtataaaagggcttggtgttgatttagcaaaagagcgccgtctcctgattttgctaagtgttggccttgtgagcgcatgtgtatccgtggccggaagcatgacctttgttggtttgcttgcccctcacatagcaaggaggcttgtagggatccaccatcgttttcttttgccgtctagtggacttattggaatggggatcgtcgtcgctgctgattggctagcgaaaacgatgttttccccagcacagctcccggtcggcattgtcatttcgataatcggcgtcccttattttgtatttctattgttccaaacacaaaaagctaaataaatcgatgcacggcaaaggaggttggtgacatgctaagcaatgctggggcatacgtattgcctcatagcgataagtgggttttaaaagcaaatggcagcgaacacgtcctatttgtatcggtgccatcagaacaggcacctgaaggtggattccctgtgttgtatttgctcgatggcaatgcagtatttgcctcgatgacagaggcgcttcgcctcatgacacggccgccacatggtttttctcccgcggctgttgtcgccattggttatgacaccgatggaccgttttgtaaggaaaggcgcttttttgattataccgtttctgctacacaagaagaggttggcacaagcaaacatggcgaaccttggccaccatcaggcggggtagacgttttcctttctatgttggaaaaacaggtaatgcctgagctagagcgaaaatatccccttgatccaacaaaacgagcatttttcgggcattcactcggcgggctttgcgttcttcatacattatttacgagaaaccacttgtttgacacgtatatagcaggaagtccgtcggtttggtggaaaaaccgctatattcaagacgtggcagccgcgtatttagcgggaaaacacgatgctgcagcgcccatgaaaaagctactgcttagtgtaggagaaaaagaaaaatcccatatggtcgaagatgcgatcgctctccatgcacgtttaacaaggaatgcatccaacattcaatccacttttttctctgtaccagaagcgggacatatgagtgtattgcctacactgatcggagaagcgattcgtttctttttagctaatggcacggagtctgaacatttataaggcaaccgccagtaagctcaataaacttactggcgattcaagtgcttggctcccaatttatctcctatttgtttttctgttttagttgatagaggtcaacaattgggcaagtacgtcctttaatacggctgtgccttttacacagtcatcaagtgaggtaaactcctctggacaatggcttctgccgtcaacgctcggtacaaaaatcatgcctgtatgggggacatggcggccgataatcatcgcatcatgcccagcaccgctagggagagtcatcgtaggcaagcctagtttttccccacttgttttaatcgtctcttgaataaaagcagaaatgggaacaggggcaatatcagttaatacttgataagaaaagtccagtccacgtttggcagcaatctccaacccggccgcttgaatggcttccactaagcggttgcgttgtgtgagctcaatgtcgcgaatgtcaacggtaagtgttgcttcaccgctaataacattcggcgtattcggatataccgtttgttggccaacggtagcaacagccgtttggctaaactgggcagggaggctttcaatcgcgaccagccattccgctccagcgacagctgcgtccttgcgcatgcccatcggcgtattcccggcgtggtcgctttcacctttaaatgtgccctgaagccatagcgggcccgcaatcccgctaacgacaccaatcggaatatttgctttttctaaccgtttgccttgctcgatatgcaattcgatgaaggcataaaagtctttgtgctgacgatgggcttttgctagtttgtgtgggtcaaacccttgattttttaaggcatctactaacgtcacgccatctttgtcagcgtagcgctcaagatcagcctcagtaaattcgcccatcatcacttgtgagccataaatgccagttggaaatcgagatccttcctcgttcacaaaaataatccattccaacgggcgaggaaatgacttgccgtcttctagaagcgattcaattgcacatagggaagcgaccgcgccgagagcgccatcgaacgctccgccattgacaacggtatcaatatgagaacctgtcgctacggctcctagatcaggctgtgttccttcgagccggccaataaggtttccaacctcgtcctctcgcattgtcagcccaatgcgtgtcccccattgcgtcagcaggcgttttgcgtgtgcttcttcgttggtataagcaagcctcgtcacccctcctgttttcgtacggccaatttgcgatagggcggtgaggcgggctgcaagtttgttcggctggatgccattgaacgcctttgtttggctggcatcatcgttgaattgttggcggataaaactcatattatgctcctttttcatataaatggttgtctcccttattatacacggccaaagctcgttgtctttctaaataagtggaagtcgattatgataaggaaagagtgatcgtaaaaaaggaggaaaagggatgcagaaaaccgccatccaaatcattaaagggcaaggttttccaagcggcgagcagctttttgttcgcggaggtcgaatgctcattggccgggcaggcccttctgtcgatattggctttgctgatccttatatttcacgcaagcatgctttaatagaagaaaaagatggcgattatacaataacagacttgaatagcaagcatggcgtcgaagtgaatcggttgccaataccagcaggcaagccttttcccctgcaccatagtgattcgatcacattggcaaaaggggtagtggagctgacatttttgcatggaagcgaacaacgccaagaacaaacgcgagaattagatgccgtcattgaccatcgtttagttgtacacaagacgaagcggcaagtcattgtcgatggcaagcgcttagcattgagcggcaaacatattgaattgctgttttgcctatatgataatcgcaatcgcgccgtcagttatgaagaattgaaagccaatgtttggcctgagcgtttggccgtacaaggaggaacggtgcctgatgttgagaaggaagaagtgaatgcactcgtttatcggcttaggaaaaagctaggcgcatacagcagcatgattgtgacagtaccaaggtacggctatatgctggatttaggagaaggacgctcaaagaaaggttgatcggacatctcaagattctgaacattattagggaaacgtcaggaaagcatcatcttcatgccatgttaaaagaggtggctttttgctatgctcgagggagaagatgaggtgaaagcaatgaagaaggcaataatggcagcgagtgttttaggtttagctggtgtagtagcgtttataggcgaaggcgttccagcagatgaaccaacatttgcaaaagagattccgaaactagaggaaattgaagcggaggaatatttttctggccatgatggcacttttgttcttcacgatttacagcaggaccgtacatttgtgtacaaccacgagagagcagaaaaagcatttccgccacagtcgacttttacagtcgcaaatgccctaattggcttggaaacgggggcagtggaagatgaatacgatataaagtactgggacggcattgaaagagagctcgacgtctggaataaggatcacacacttggatctggattgaggcattctgtcgtttggtattaccaagcgcttgccagggatattggcgaagaacaaatgcaaaaatggcttgatgccatttcttacggcaatcgcgatatcacgggtggcattgaccaattttggctaagcagttcacttgagattactcctcttgagcaagctgactttatccacaatttatactacgaagtacttccattttcaaaagatgcaatgaaaacagtaaaacgtatgatgatggaggaggaaggcgaccattttaccctttatgggaaaacggggcaagggccagacgttggctggtatgtcggttttattgaatctggcaatggcacgtatgcgtttgtgacaaacttagatggcacaagtgcgcacgcgaaagaaattacgttaagtttgttagaagaatttcacttaatggatgggccatcataaatagagcagacagagctctatccgaggttgtcgactaggttgacaacctctttatgcttatcgcaggaaatcgagcattgtcagacatacacgatccgccttttatcaacgtcttaaaggctttttacttcttccagcagtgcctttagttgggcaatggcttgctggcagcaggaagcatgactagaaagaagagtgattgcttcatcaatccgttctgtgtagtgaagcggcttacgtggaaaggatgaaatcatcatgacggctttcttctcattaatgcaatatcgttcatttttagcgaagaggacttgatttaaacaggctatcgctcggtagccgtgccccatcaagtatgataaatcgtttttatcaacattggcttccatcaacatgagggaaaatgaagcttcaaacgtgaaaaactggataagcgcctgtttcatttttattggatatggctcagtcaacgcttttaattgtgcgagttttccgaaaggatcagtttgaatacgggagatcgccagttcacccatatacatagcattggcatagccgtgtggatgtcccgtttggtaatgcatcgtgacggctccgttacggcaatcggcaatggcttgttcgacccgtgtgatgtcacgtaatattagatccacgtgatagctattaataacaagccaggcaccagcattcacccactctccccactccccaatagcggtaacgacacgctcctcttcgttacaatcttgtaaagcccggacagaccggtcaagctgttcggtcgtaaatccttggctgagatcataatagatgccgatatcgatgtcagaattggcgctgtgggtgcctcgcgcgcgagaaccaccaagaacggtgccaacaattccgggcacagcttttagttgttcgcctactttggcaacgagttcgtttggatccatggcttatgtgctcctttcgctaaaggttttgcaaacaaaacaagcatacacgataagcaatcattcatcaaagctaaacggaaaaaactggctgccgataaaaaagaaaagtgtgcaaataaggagggggcagactgttgtttttaagaaaagcaaacaaacaggagaacgagcaagtgaaaagggagccagaccctattaaaatcgaactggatgaaagtgactgccaaaaacaaattgggtttatcgatttacatgcaagtgatctcgaatatatacatctcttgtatccacttgtaaacgaacatattgcaccgattactgaagccttttacgagaaattgcttgaacagccccatttacggcagctagtaacgactcatagcagcattgacgcgttaaaacaaacattaaagcagcatattttagaaatgtttgaaggaaaggtggatgccgctttttttgctaagcgtaaacggatcgcgcaaacccatgttcgaattggccttaaaaccaagtggtacatcggcgcttttcacaacttgcaactagaactacagcggatgatcgtcaaacacttcaaaagtggcaatgaacaatttcttgctttttgcgcagttgggaagtttatcaactttgaacaacagctcgttttagaagcgtatgaagaggaagaacggcggatccggttaaaatttgagaaacataaagatacgtatatcgggcaagtccgccacgctctccaaaacattgagcatttagtcggtaaaatcgagcaatctgtccaaaaagcagctgtccaatcccaatcaattgaaacattaacggacgaaggcaaatttcattccgcgcgctcattagatgcttccaaaagtggccagctgcaagtggacaggcagagcggccatatggaccacatccaagcatgtataaaacaaattgaagctagcatgaatgaattgacgacgttatctacacaatttgaggaagttgttgcgattgttaagcaaatcgcagaccaaacgacactattgtctctaaatgcgagcattgaggcggcacaagcgggagactacggaagagggtttgccgtggtagcagaccaagtccgcaaattagcaataaaaaccaaagactcaagtggccacgtagccagtttagtttcagacgtccatgcccaaagaaagcttgttgaacattcgatttcggaagttgtccaagctgttgaacaaggaatctctagtatggaaacgatggagacatgcttcgaacagattctccattttgggcaaacaaatgaagcccactttggcgaaattcaaagcaatgttagccaattgcatgtatcgatagctgaacaaatgaaagcggttgtctcatcagctgcagctgcgatcgaacaattggcagctcagactgcaaattatgagcaatcgatcgagaaaaagacagaagacgagatcacgactttatcagggcattcctgaatagtcttaaaaaccctttaaagagcgtgtttaatccatcgttttagtggatgagggcatttggacggagtgccttttgatgagttcatgtcggatgatccgtcctgaacttgctcgcccggttgcgattgaatcaaacagcaagttagcagccgttttgcccatgctaaaaaaatgttgcgaaacggttgttaaaggaggaacggccatttttgcgagcttggtgccatcaaagccgataacagaaagatcttccggaatgcgaagcccttttgcagtagcggcggacatggcaccgatcgcgagttcatcgcttgccgaaaagatagctgtcaaattcggatgatcggtgtaaagccgttgaaaggctttctgcccatcttcaaaatagaaccctttgtcccaggcaactttcgtaggcacataagcaattcccgcttccttgagcgcccgtttgtaaccggccattcgtggcgctccagccaacaaatcagacgggtttccgctaatcataccgatctctgtatggccttgctgaatgaaataacagatcgcatcataagctgccgtttcattgtcgacttggacagctggtatcgttgggtcttccgaataagcagatacggtgacaacaggcacgcccattttgcggacgattgccacatattccaatgttagcagttggcttgcaaataaaatgccgtctacttgtttttcttgcaacaactttaagtattcttttgttttatggccgctagaggctgtattgcaaatgacaatgcttttccctctcgcatgtgcagcttcctctattccttgaagaatttcagcgctgacaagtcctgatatttctggaaacaaaacgccaatcgtattgctttgcttattaatgaggccgcgggcaatcgcatttggggaataacccatttcttcgattgtttttagcacatgttgttttgtttttatagaatagccaattccgttgtttaatacgcgggaaacagtggcaatcgaaacgcctgcttctttggctacatctttaatggttggtttgttcaatcgcgtcattccccctaaaacacactttcctaagtttagtatgggagcgttataataaatagtcaagcgctttcatgaagcaacacgagtacatttactgtactcgtgttagcctgtggacaagggtatgctcggcatttgcttcggtcatatgcttgcttatgaaactacgtgtattcgttacgtcccactctaccattttttgtctaatagttaaaattcttcatattcagcaggatcctggttttgaatgcggccgtcggcttttgttaatttgtttatttgctccatttcttccgtgcttagggaaaaatcgaaaatcgctatgttttcaagttggcgttcaggtgaagccgattttggcaacggaattgccccaagctgtacgtgccagcgcaatataatttgtgagacgctttttctgtgcgtagccgcaatctgtttaatcactttgtcttgcaaaacgctgctagcgcggccgagagggctccatgattcagtaacaatatgatgattgttatcccaaacacgttggctttcctgagaaaaataagggtgaagttcaatttggttaatgcttggcatgacgcctgtttcccgttctaatcgctctaaatgctctggcaaaaagttacatactccaattgagcgaataagcccccatttttgggcatcgattaatgcttgccatgcttctacatataagtcggtttttgggtttggccaatggatcaagtataggtcataatagtccaatcttgcgcgcaacaaagattcttgaatggtcacgatcgcttgcgcatatgcttgtcgccgccctggtagctttgaagtgacgcgcaactgttcccttgggacagaactacgccgaatcgcttctccgacagctccctcattctcgtagttgaaggcagaatctagcagacgatagccaatatcaatcgcgctcaccattgcattgacgcctgctgctccattcaacgcatacgtgccaaagccaatagctggcaactgcagcccatctttcagtgtgacagtgggaatcatctgaaacactccttgtcttttttcaatagtctaacattgaacgtttatcaacgtctaaccaaaggttgtttgcgacttcaattgctgttgacgctttcctttgctgctgctatagtgttggtgataatgattttcatttgcaaataaacatatggaggtacttggttcatgaaggttcctgttattttcagttctttccttgcaactgtacttttgcttggaggctgtggcaatacaagttcaaatgaaggcgaggagcctagcgacaatcaaaacgacgcaactacgagtggagagacgcgggcgtttacggctcctaatggggaagaaataaacatacctgaaaatccagaaagaattgtcactgatttttatgctggcgagtttttagccgttggcgcgaatgtggtcggggcaggttcttggagtttttcgaacccgtttattgaagaagagcttaaaaatataaaggatgtgggtgatccgattcatacagaagaggttcttgcgcttgaacctgacttaattgttgtgatggacgaagaacaatacgagaagctttctcaaattgcgccaaccgtagtcattccatacaatacggccaaaaatgttgaagaatcgttgcaactgtttggcgaactagcaaatgccgaagcagaagcggctcaatttctcgacagttttaatgaagaggcggaagcggctcgagctcgcgtacaggaagtagtcgaggacgatgcgacatttggcatttatgaattgacggacaaaggcgatttctgggtattcaatgacaacgccggccgtggcgggcaagtcatttacaatgcgcttggtttaaaggcgctgaaagcgattgacgaagaagtaatcaaaacaggggaaatgaaacaattgtctacggaagtcattcctgattacgcagctgattacatgtttattaccgactaccatcctgaaggggacagcaagcttgctgagatggagtcttcccctatctggcaagggcttgaggcagtcaaaaacaatcgtgtgtttataaatgatttcgatacattttatccgtatgacccgatttctgtccgtggccaaattgatttaattgctgacatgattgtagagcgtgctgaaaataacggccagtagaaacgggacaacttagcgatctcgctgttccatttcggtggaacagcttcttccgttttcatctaccggggcttgatttgccagcaactctttgccaaggtacaatggtagaaaaagaggtgtgaaccgttgtcagctcctacgccggaaatcatcgaggctgtttcgtttatccagcgaaacctccatgaatcgcttcgcttaaacgtgatcgccaaacatgtcggatatagtccgtatcattttgtccgaaaattcaaaaatgaaatcgggatttcgccgctttattatgtctctgcccttcgtttagataaagcgaaacgcctgctcgtccatacaaatttaggagttcgcgacatcggtttagaaattggccagcaaagccttggcacgtttacgactcgctttactgaacgagtaggggtgagccctggccgtttccgtgaatcattagcaagtgcggaaggacatttacaagctttgcaaaggctgcaaaagtggcctgcgacacgagcggctgcccctccgataaatagcgtaagcgggactgtgacagccggttcgccgttttcaggtgttgtgttagtcggcttattctcaaaaccgatccctgaagggttgccacgttacggtacgttgctctctggcagcgacgatttttgctttttgaatgttgcccctgggacgtattatttgctggcaacagccgtttcatgggggatggaaggcaaagactttctactcccgcagcaaacattgcgcggccgcctaaagacagcgattgtcatgcggccatttgccgcagtagaggggattcgcctacaacttcaccctcctaaacaggatgatccgccaatcttgatttccttgccattattgatgaaccattttcttcttaaacagcgcaattggtgagaaacggccgtttgttccatttggtaagatgagtgtaacttgatttaaggaggcaatgacttgaaaacagaacaaacacagtttacgcaattgtatgcaggtttaaatgaggcattcgccaaaggggacgttgattttattcttagccatgcggccgaagacatccggtgggaaatggtaggtgactccgttattgaggggaagcaggaggtcgccaaaaggctggaatcagtagtaggggttgtgagcgaagaatacacgacaaaacggatcattgcttctggccgtactgcagccatcgaaggaaccatgctgtgcccagataaaacaggaacgaaaaggaaagcggcgttttgtgacctatatacactcaatgaaaaaggaaagattacggatttaacggcttatttcttttttttataaaagaagatcgtttccgagaacaacgcctggttacgccaggctgttacgccaggcgttgattgtgtcataaaattttatgcttgttttttaaaacgtttacatgtatgattttgataatcttacaattgacttacgataatcaaaacgaagagggaagaaatgaaagtcacagcaaaagaaatatcgaaacaactaggcgtttcaattgctacagtagatagagttctgaacaatcgcgccaatgtcagtgaaaaaatgcgcaagcgcgtattggaaaaagcggaggaaatgggctatgttcctaaccggatggccagcatcctctcacgaaaagtaacctttcatgtcgctgtcgtttacaaagaatatccggcttacttttgggagcaaatcgagacaggcattgcccaagctgaattagaactgcgggactacggcgtcacagtccatcgttttcgcctcccggttgaagcatttacggaatcacctgaacggattcaagaaatattggcagatgacaccattgatgctgttgcaatagctgcccttggcgatgcgatttccccgtatttaaaagcgagtaaaaagcctatttgtacgtttaatgtggacgcacaaaacagtgggcggttattttatgttggctgcgattattactcgtcaggaaggttagctgctgaattagtggcgaagctggttccagcgcaaggaaaggttggcgtgctgctaggcggaaatcatgattaccaagcgcgggaaaaactacaaggttttcgtgaaggcctagaggaatttaggctggagctgtgtaaggcggttcgccttggagaaagtgacttgcccttccagccaggacagcaatggcagaaagaaatggctggtttggatgggttgtatgtagctacagcagagttagggaatgtggccgagtttttttcaaaataccctaagcatcaagtggcagcattggttggccacgatatgaatgatttgatctataagcatcttcatacacaaatgattgccgcaacgattactcaagacccagtcagccaaggatacctagcaatcaaaaaattgttttctttgatggtgctcgaggacgaagacgctaaacaatcaacgattacgaaactggaaattgtcatgaaaaacaatgcctcgtactatacttaatcattgggttgtatattccaatgattaagttgtttctttactttgttttgattatcgataatcaattgactgaaaaatggaggttgaaggaacatgttaaaagcgattcaagttggagtaggggggtttggactttcttggtttgaactgctccaatcttaccagcaagcagaggtagtagccattgtcgatccactcgagacgaatgtgcaagcggcattgaaacgggcaaatcgcaatgttttatcatttgacagtctagcagaagcaatcgagaaagtagaagccgactttgtgttaattgtgacgccaccaactactcatgccgatttggcgaagacagccatcaaagcgaagcttcatgtcatgatggaaaagccattgacagatacgctcgaggaaggaaaagcattactggcatttacgaacgcacacgcgcaaaaagtaatggttagccaaaattatcgctaccacccgcaaatccagacgattaaagagttactcgatcaacaggtgattggaaaggtggagtatggggattactattttaaccgcgccactcgttttggcggctggagggacgaatatgctgatattcttttgcaagacatggcgatccaccattttgacattctccgttttctgctagaaaaagaggcggttgaagtgacagcagcaagcttccgcccatcatggagctggtttaaaggcatgcctaatgcccatgttgagatcctgtttgaagaggaagtgcgaataagctataccggtagatgggctggaaaggggcgtaaaaccccttggaatggagaattgcgtctcgtaggtgaaaaaggggcaattgaactagtcgacgaccgcgtttacgtgtataaagcagaagaagatgaaccaacggagattcagcttaaaacgagtttgttgccagaccgactgttgtctcttgatgcatttgttgccgctattcaccatgatacagtcccacctacgtcaattgaagataatgtgaaaagcctcgaattgacgtgggcagcgattgaagcggcaaagtcaggaaagaaatggacttgttgaaaacggcttgatactcgttaaacagggagtgtttctttatgaaaaaagcatttgcgttcatgctggcatgttcactggcgcttggcgttgccgcctgtaacgaaacagcctcgaaggagcaaacgactttgacatggtgggatacatatggcagggatggcacagaaaaatcagtcatcgatgccattgccaaatatgaggaagcccatcctgatgttaagattgaacgcgtgtctgtccctttttcagaaatgcaacggaagcttctcttggcgatggttggcggggaacttccagatattatgatcgtagataatccgaaccatcaagcgctttcagctgccggggcaacagctgatctgacagaattggttgagcaatggggagaagcagaacagtattttgaaggcccgtgggaatcaacgatgtaccaaggacggaattttggcattccatttggaagcaacaatttagcccttttttacaacaacgacttgctagaagaagcgggagtcaaaccgcctacgacatgggatgagttgaaggaggctgttcctcatctggcaggcacgacggacggttacccattttctgtagctgctgttcgcagcgaggaaggcgcctttcaatttctcccttttttatggcaggcaggcggggatttgcaccagttggatagcgaggcaacgagagaggcacttgcgctttggaaagagtttattgatagcggttacatgtcccgtgaagttctatcgctcaatcagcaggatattgccttgcaatttgtaaatgggaatacagcgatgatggtaaatgggacttggcaagtggagcaatttcgcgattcgcttgaatttgattggggcgtagtccctctcccagcggctgaggcacaggcaaccgtcatcggcggcgaaaattttgcgattggcagttcttcagagcatattcaagaagcgtgggatgtgatcatgtttatgcaagaagaagaggtgcttatgcaaatggtaaaagacaaacattacttgcctgcgagaaaagacttaatcgaagacccctattggcaagaagacgaaatgtatgagccgtttgctgaaagcatggaatttgccagagcaagggcatatggcgaacagtacccagccatttccaacgaagtacagaacatgattcaagcagcgctgtctggatcaatccctattgatgaagcgattcaggaaacagccagtgaagtgaacgccttgtttgagaaaaaccaataataagcttagggggaaagcgaatggagtcgccactttcagccgtaaaacggccgcgttcgttcaaaccgaagaaaaggctgcaaaacgatatagtaggaaagtatatgtttgtgttgcctgggctgctttttttagctgtctttatgttgttcccaatcggctacaatgtatatttgacgtttcataatgtaaccgtattcaacattatgtctggctacgagtttacttggtttgacaattacaaggctgttttaacggacgcggtgttcttgcaatccatgaagaactcggttgtgtttacaacattatgtttgctattccagtttgtcatcgggcttgccttggcgttattttttaataaaacatttccaggccgtggcctatttcgggcgctccttttaatggcctggatgattccacttgtgattaccggtacgctgtttcaatggatgttcgcaggcgaatatggggtcatcaaccattttctattatgggcaaacattatcgaagagcctatttattgggtgtcgaatgagcaaacggccctttatagcacgattattgctaacatttggattggcattccctttaacatggtcatcttgctggcaggactccaatcgctgccaatggacatttacgaagcagcccgagtagatggggcttctaaatggcggcagttttttgcgattacattgcctttgctaaaaccgacgttgttcattttggtcatgctcggcatcatttacacatttaaagtgtttgacatcattttgattatgaccaaaggcgggccgctgtacgcttcaactgtcatgccgttttatgcctatgaacaagcgtttattaactacaacttcagtatcggcgctaccattaccaccgtgatgcttgccttgttgattgttgtttcgcttatctatttacggattgctcgtaaggaggatgcagcatgaaaaagcggtttgtggaaagtcagtatgtagccagtttagttgggcttatttcaaccatgctgtttttgtttcctgtttattggatgtttgtcacgtccattaaaccaatgtcagcgattttcgcaattcccccacaactcattccacgggaggcgactacggatgcctatatggacaatattttaagcaacccagagattgtccgtttttttctcaatagtgtcgtgattgcactgggcacattggttttaacattagcgcttgctgctcctgttgcttacggattggcaaggctcgacattaaggggaaaggagcgatgattggcgtcatgcttgtagcgcagatgctgccgagcatcatgctggcactgccctttttcttgctgttttctcatttggggttgttaaatcatgttatcgccttgattttggccaatacaacaacggcgctgccgtttgccgtccttgtattgcgtccattttttatgtccattccccaagggttagaagaagcagcagccattgacggaagcaatcgttttttaacgtttgtacggattattttgccattggcaaagccagggctgctaacagtcggtgcctttgcctttttatttgcctggggtgacttgctatacgcccttattttgacaaccgatgaaagcattcggccgcttacagtctacttgtatacgtttgttggccagcatggaacgaattggaacagtttaatggcagtttcattcgtggccattattccgattatcttaatttttattgcttttcaaaagcatattgtcgatggtattgcatctggttcaatgaaataaataatgggaggaacgaatgatgaggcttggtgtatttgctgttttatacggagaaaagccgttggcagaaatgttggatcacataaaagacaagggccttaatacagttgaaatcgccacaggcggttatgttggtgatgcccattgccaaccagaggtgcttttaacagatgaaaataagcttgccgcgtttaaagcttcttttgacgagcgtggtataaccattagcgcccttagttgccatggcaatgggctacatcctaatccgcaggtgagcaacgcgcatgaccgtgtgtttgagcaaactgtacaattggctgcaaggctaggtgtggagactgttgtgacattctctggttgtccaggcgagtcggaacagtctcgctatcctgtttggaatacgtgcccatggccacatgaattttcggaaatgcttaaatggcaatgggaggaaaaagtcctcccttactggcgccaaaagcatcgctatgtaaaagaacatggtgtgcgggttgccatcgagccacatcctggttttgtcgtatataacaatgagacattgttgcggctacggggggaatgcgggaagcaaatcggcgccaattttgacccgagccattatttttggcaaggcatggatcccgccctttgtattcgtgaacttggagaggccatctatcattttcatgcgaaagacacgaaaatcgaggcagtaaacgcaagccgcaacggcgttcttgatatgaagccgtaccgcgatatcgcgaatcggtcctggatttttcggactgtcggttatggccatcatgaagaagtttggcgagaaatgattagtgcccttcagctcattggctacaagggagccattagcattgagcatgaggacgggctcatgacaaacgaagagggcttgacgaaggcgatcgcgtttttacaaacggcgattattcgtaatgatgcgggcgagatgtggtgggcttaaaggaaaaacgagtacgcggcaaagcaagaagaggtgataataaaattgaatcaataagcttccaataaaccacacacaagcaccaggctgatagcgctataatgaggaaggaatgttttgaattaaaaaggagttatcagcaatggggtacatgagtcttgtatttatgaacgttgtccttccaattcttattttaatggcaataggcgctttgtttcagcggcgttttcactttcaattaacgccaatttcgaaactcttgacgtcttgttttatgccagctgctgtgtttttgaacatttatgaagcacagtttgacatgcagttattagcacagcttgttttttatttgctcgtgttcacaggaagcacgatggcgcttgggcagcttttagcgaaagtcctaaaattaaaacgcggggaaggagcggcattaaaaaacagcatctcgttgatgaattccggcaattacgggctgcctgttagccaacttatttttagtgcaaacccgttgggcgtgtctgtacaaattattgtccttgtttttcaaaacttgcttacatatacatacgggctttacaatttgttatcggcgactaagtcgatcgttgacattggcaagtcgcttgtaaagcttccaattgtgcatgcgctgttagcaggaatcgtttttcaagcttttgcttggccgattccaggatttgtactcgttccacttgaacaattggccaatggatttgtagcgttggcactgtttttgttaggtgctcaacttgcaggcatacgtttacgttctttccatcgtgcaatcgcctggagtttgcttggaaggctcgtcgccggtcccgcctttgctttgctgttcatctttacccttggcattgagggtgttgtagcccaatcgttgtttattgcaagctcgtttcctacttcaagaaatacggcaacactggcgcttgagcacgaggtagagcctgagctccatgcccaaatcgttctttattcaacgctgctcagttgtataacagctacagcagtcattcatttggcgagcgtcttattttaatggtataggcaggaggctactatctgtcggcgtttatccaacggtctctgtttcggttaccttgatgtcgaggagatagtagccttctgtaccgcgaagcaacgtgcataaagcttccagttttgcaacggcttcagtaggagttaaggctttgttatcatttaggcgaatgcttgtcgaatgttctcggtgatgatctctacttgcttgtttgcttgactcgccttcccccgccttgtttctagccgactcatgtgatggttcgtttgacataaacatcctcacccttcgatttgattgtccgctactttcaatccgcagcgggaaagactagcaaatgctatcggaataggcgaaacattccacctcttttttctattttcttcttcctttttcctccttttccatccatttctttaaaagttgttttgcctctttacgccgatgaagaccaattttgctataaatgttactgatatagtttcttacagtcccttcatgaatcgccatttcgtgggcgatttttttgttagggtagtcagccactatgtaagcgattacttttctttccatgcgggagaagtggacacgggccaaatgagtcgattcctcttccaataaataggtatcataaatggacttgccttgcaagatttttgctactttttccattaattgttgaaagttggtgcttgtcgatagaaatccgttgacatcataattcctacaaactttgatgtactcgtatgtcgccctatttgcgagcacaagcaccggcaaatggggattgctagcgcgcagttgtttaataaaggcgatactgtctggctgttctccatagacgatggcgatatctacggaaaaattggcaagacacgtttctacctcatgagctgtgtggacaacgcacagctgactgtcggtttctgcaatacggtaacggaacatgtcggcaagcaagccttttcttgaaataaataataggttcatcgcctcatcatgactatatatcaaccctttcccttcgtgctcacacctctaccgtaatgtgacgacctgtacaattcctaaacattccacaaagccttatggactatgtatagaaattgtatagatcgaaacagtattgttaaccaaaagagtattaaacgaacgagtgtgtcggttttaggagaagcgaggcggattaggcaatgacggtgcagatcataccagtatttaaagttacgaatttggctaagagcaaagagttttatacaaaacggctcgggtttacagcaaacgatattgcagctgattgcgtggcggtccaaaaaaaagatgcgatcttccatctaatggagagatcaggaagtcaaaacgcccattgccgtctatttgtagaagacattggcgagttttttacggaaagagagacttcattagaggaatggaaagcacttgggaaattgtggttaagtgcaaatggccaacttattttagcaatcaaagatacggatggaaatacaattgaattgattgagggcaaccaaaaacagttggatctggtacctcacctaaatgcgtgtgaataaattgttccttttctcataagctaaatccagcttagaaagaaaagagggtaaaattatgggcaacaaggacaaaaagcgcaataaccaatttaaagagaacagcaatcatggcgaacaccgcaatggccggttaagccaaatcaaaaaccatcatgcaactggcggcgaaccaaatgaatatttgaacagaaaagcggatgaggaagagcatggcccaaacacaatcaattaataaaagacgcccaatgcaagtgcgtcttttttgtttttcgctaaaaggagggaatagacatggcaaatcggtaacaggaaaccattcctggctagatcgtattttcagcaataataaatagtcgtcaaaaaagtggcaaatggaggcagcggcgtgctgttgttaaccaaggcaaattatggcgatttcttgaattagtttgtgaaatgttgaacaaatgaaagtatttgtgtatagtggaggtagaaagacatgtgaaaacattcacaaataaaagggggaaatcatatgttacattttttacaaaagacaaaagccgcggctgtatgtttgcttgctgtgcgactatatttaggatggatgtgggttacttctggatttggcaaagtgacaggcggattcgatgcttccgggttcctggaagccgcagttgccaatcctgttatgaaaggggagggacttgcttttccactctaccatgcatttttggaaaatgtggcattgccgaacgccgggttgtttagctttttcgttatgtggggggaaatcttcgttgggattggcttgatcgttggtttgcttacacgaagcgctgctttctttggaagtacgatgaatatgtcctttttgctggcgggcaccgtttctaataacccgatcatgctcattctatccattttcattcttattagcaaaaacaatgcaggaacgatcggtttagaccgttatgcagctccgttattgggacaatggccgttattacaaggaaaaccgaaaagaaaagcaaagagcgcctgacctgatgcctaaataaatagggtcaacgcttgtgcgacttcaagcagctacaatagctgcttgtttttttatccgtaatcgctccagcaaggctgcttctttgattaaaataaagctttggtaatgaaaacgtacagcgttcaagcttacagatattgcatgtgctcatttggtggtgcttgcccatactaagggcaatgaaagatagcgaagccaaggagaaggagccagtatgttattaagacatttgttggatatattggagtacgagaaacgtcacggcagcgatgctgttaacataaccggcatatcgaataactcaaaaacggtgaagccaggtgatttgtttatcgccattgcgggctattcgatcgacggccacaagttcattgaccaggcgattgccgcaggagctaaagcagtcatcggcgagaaggaaatcggaaaacagactgttccttatataaaggtgacagatagcagaaaggcgcttgcgttagctgcaaagcgcttctataaaaatgaacagaagaaagcgatcataattggcataacaggaacaaatggaaaaacaacaacgtcctatatgttgaaacacatagtagaaacatgtgggcatacatgctctctgtttgggtctgtccaaaacatcgtaaacggacaaaccttaccagcaactacaaacacgacgatggatgctctggagctacaaaggcaattggcagcgagcaacgaccaagtggttattatggaagtcacttcccatgcattgatgcagtatagagtatttggaatcgaatttgattatgggttgttcactaatttaagccaagaccatttggattatcatggaacgatggaagcttattttggggcaaagctacggttatttgaacaacttgcgccagctggcaaagccgtcattcacgctcaaggtgaatggggggaagcatttctagcctctttgaaaaagatggatgtgccttacatttatacattaggtggagcagaagcgacgctacaattaagcaatgtccggatcgaaaagccgatgcaagccacgcttgctgaagaccataaatcgtatgatttaaaggttcctcttcttggcgaacataatgtgtacaacgctgcaatcgcttttttgacagcgcgcttgcttgggctgaatgcaagaaaaatgttggctgcacttgaaaaattcccaggggttcctggacgttttgaacttatacaccatccaaaaggcgccaatatcgtgattgattatgcccacacagaagaggcgttttatcattgtttaaaaacagcgaaagagttaaatgcccgtcgaatcattcatgtgttcggcttccgtggcaaccgcgatacgtcaaaacggcaggcgatggttaacgtttcgaaaaggttctctcacttcattattttgactatggatgacttaaatggcgaaagctttgaaaggatgaggaagaagcttgagaactaccaacttggcgaaaatggagttgtgattcccgaccgcacaagcgccattgcttatgcgtgggaattagcggaaaacggggattgggtttttattacaggcaaagggcatgaagcctataggcaatcgtaccacttgccaacccaatccgataaagatacggtacaacatttatggcaaagaacaatagccagtaagatgttggttgactgaaatttagcctaactttgcttcaaaacttagtttttccagtgctgcagagatggatgaataaatgcggatatgggtaaagtcaatgccaagttgaatcgccgtttgggcaatttctggtcggatgcctgacagtgaagcttttgttccaattagttttaatccatctattaaggagaaaatctgattggcgaccatcgtgtcaatcaccggcacgccagacaaatcaatgagcagtgaatcaacgcgggtgttgacgcattgttcaagagtttgatcaaagataacttttgctcggtgcgtgtcaatttcaccgataagcggcaacagtgctacttgctcatttaaatggataacaggagaactgagttctgtaatcatatctttctgtgcttgcagtagttcttcggataactcctggttacggacactaaacgcaatcataatttttttgaacgagtggaaaattaactggatcgtctcgttatactgttttatgctcatctcaggatggtgcgtttccacatattggtgcaagacgtgtaaatataaggattgagtatttaaaaattcttccataatttcagggaggggtgtatccaaatgagcagggtccgaggcgatgtcagtaacccacttatctatgtagatgtcgacttcttcatttgctggattgaaaatttcaataaacagttcgtgaaactggtggttttgcgcttttaattgcttgatttttattgggtccgttgttccataaatcccctctttcgacttgtctaaatttgcataccatgtttccgtcaactctgcagatcggtctttaaaatattgatataaagacaaaggcataagcgttcgctactccttcttaaatactgtatttatcgtcattattacagctttttaagcgcttgtccagattgtggcccgcaacaaggacaaacgatgttttcgcaagtatgtcgctgtttctctgttacttgaatcgaaaaggaacctcttgacttgtctttctatttcatgctaatttgattacataatcaattctttgattgtttattcaataggggggagtcccgtggccgaatcgtttattgccgaagcacgcagagaacagattatccaagcatgcataagaacgctttctgaaataggctacaataaaatcagcttaacaaagatcgccaaaaacgcgaaaattagcacaggtttgatctcctatcattttaccgataaagcggacttaattcatcatacgcttatgtatttagttgctgatcagcttcattatattagtgagtgcatagaagcgacgaaaaaaggggcaacggaacaattaaaggcttttattgaggcgagccttgcttatcaggcaacccattatgaaaacaatgtggccatgattgaaattgtttttaatgcccaaacggaagacggcacgcctttttatcttttagcagacaaggagacagatgggctcgaattgttattaaccgaaattttgatcgctgggaaggacaaaaaagagtttgccactgatttcgatccagcgcttgttgccacgatcattcaaggagcgataggggagatcatgttaaaaaactgcaaccatgagcaatatgaaacgtataaaaatgaattgacacggatggctttaaagatgctggcttagagctatccatcttctacgaaataaaactgattgaacagccaaataaaaaattggttaactaaaaaaacggaggatgaaccatgcaaaacgttaccaaactaggcccgaagcgttttgagcaggggcttgtgtggataataccggctctagtaggaggagcaatcggctggtttctgccagcgattattgattttttgctaagtattcctttcttgtcatcgcaaggcgttctgttgctcattgattcgttttccgccttatttgtttccattgctggagtagtggttggcgtattgttaggactgattttgtcgggggcagcttttcatgaatcgttagtggttgatgtttccgactcaaatgttaccgtaatgaagaaaaacaaacaaaaacagtttttaaaaacggatatttctgcagtgtttgttgaacataagagccttgtcattctcggggcaaatgggaaagagctttatcgcgaaacgattgatgtcaagcaagacaaagtcgagcaagcgttttggcaccatcgttatccatgggttaagagcgatccatttgctaatgcgtaccgactttggacgcttagcgatgaagcttgtggtgaagcagcgaacaaggttctctattcacgccgtatggccttaagagaaggggaaagcgaacaagcagagcggttgcgggaagatttgcgagaattaggtattgccgtaaaagataagggagaagagcagtatatccgctgtatgcaaacaaataatagctattagcacagaatcaatttctgtgcttttttttgccagtcccttgacattatatctacttagtaatactatatacctgtacttagtaatactatatacctgtacttagtaatactatatagcggtgctctttcatccttatttgcataaagaggtgcttgttatcgataatttaagtttaatgctcaaaggagtattgcaaggaatgattttgcagttgattgagaacaaagaaatgtatggatacgaaattacacgtaagctaaaccaactgggttttactggcatcgtcgaagggaccgtttatactgtgcttgttcgtttggaaaagaacaagttggtcaatgtggtgaaaaaaccttctgatatgggtccgccgagaaaattttatacattaaacgaggaaggcaaggaagagcttttgcgcttttgggaaaaatgggcgttcttaagtgaacgaattgaacaaatcagaaatgagggataagaatggctttaagcaaacaggcgcaagaaagcattaaattattcgcgaaagaacaagccagcaagcatttggacaatgcggaaatgagttattttgaaagtttaagccaaaaaagcggcgaagtgaagaaaaaactcgccaaacaaatggaaaagtttaaacggacatccaagcaaacccttgaagcacgtgaggatttagaaacgtatatgagcgattatgtcaatgatctcatgagccaaggctaccaagaggaagaagcgatggagctggccaagcaagcactagctgctgacagcgacagcgatttagcggcaaattttcaagataagtataaaacgtattatttaacccgaagccctgaaatggaggaaacaatcggactgttttacgcaggctttatgtttgttggcatggcgatcggtgccgtggttggcatactgataggggcgtttgtgtttactgcacacttttttgcctcagtggcgatcggtactggtctcgggttgatttttggactcggctgcggcatgcttaagcacggctctatcgtgaacaaatcatcagccaatgaccgctattgatgcgagtatttaggaaaactagttaggtaaaaaacgcctaactagtttttttgattcgtgtagcccatgtaacattttggtgtttgtggcaactaggggcctaaatttctagtgttttcgccgttcgtttacacattatgtctcttgttcggacaaaaatggacaaattaaattacaatcatattacaaatcgattacatttttcttgcttattctaagtgtttgttataaaatcaaaatgaatggaaatatattctatccatttagcgaaaagtaaacctagttgtctacttttcgggcaatcataatcgaataatccgttacatacgctatctaggagactttgaaaaataccgaaaaaagaaactttctaggattgtttcagtttttaagtcggatgctgtgttttcttcctcctaaatgaagcaaaacggagtgattgagaggtgttgacgaatgaaacactttctggcacttatggcgtttgcctctatttgtgtgctcgccgcttgcggcagtggtgaagaacgtgtggccgcttcagtttctacccacgagaacgttgtcctggaaaaaaccattcctgacctttccgtgaccgtttttttagacgaggaagaattcgataaacttccagtggagttggtcaacgaggatgacctccgaaaatgggcaagggacttggctagaggcaaagacggctttgaccaaacgatgataccggctaaatggaatggccaagaactagttggcggccaagaccaagtaacgctcgacgaacagaagctcgttgaagacatccttagcttaagcgtttgggagcgagaagtgacgctgcctatcaacaggcaagcaatttctgccagagccgaagatataaacaacattgagaataaaacaattggccacggccgaacaagctacaataagagcgttagcggacgtgttgaaaacattcgcttgtcgacagaaagcgtagactatgtcgttttagggagcggcgatacgtttacgtttaacggcattgtaggcgaacgcacaaaagaacggggctaccaagtggcaagcgtcattatggatggcgattttacagatgggcttggcggcggcatctgccagacatcgacgactctttacaacgctgttcttgacgcaggtttgacggtattagaacgccatccgcattctctcccagttggttatgtagaagagggcatggatgcgatggtaagctggggcagtgcagatttgcgcttccgtaatgactttgattacccagtcgtgatccgtggcggcgttgataaagaaaaaggcgaagtctggttcgacattcgcaaataatgttgggtgaggggaacgaaaatggtcgttctctttttttgttggagaaaaaagaaaatacttgaatattgtgtaaaatttgatgtcgaaatggaagggggaattaaaaaagaagagcgtggtctatcagtggggcaactagattgttttcttgtaaatccacgtggatatatgacaaatttcaattttataacactataaatcggtgagacaatcgttaaaaacaggcaacctattctttataaacaagtcgcttttttttgtacttcatactaacgcgaagctagtaatgaaaagggttatgaacgaaacaatcattagaaacgggtatggaaagaacttgttttgaaaagcataaatataatgatccaacgatgtgactccttgaataggaacgtttctcccgtccacctttacttgtatattacgaacctcacttcctacgtaccaagtaagtgcgagtgaaaacaacaatatcattatagacgcgcctaatggtaaagagtatttgtaaaaattcatttatttcccttcttcccttaaacatttttatccattataacacgaaaggttttaaattaactattatttcagaatacaaatattaatactgagcatccatccgttggactgctttgcgacgaggtaatgggagcgagtgatcgtaataacgcaaggaggcaattgcttcgccgctaaaaaaaggccccaaacaatagacgtctgggacatgaatggtgccctttagaagggcgagagaatggaattcgggagcgagtatggtgtaggggagaatactcgctctttaaatactaccatatttatcggaaaagtaaagatttaaaattggtttttttgataacggctttttcatctattttctgctttgtggttgagcgagcccccatctgtctcttttttgctcagcatagagtttatagcggtcccttgtatgttgggttgtttatagctttactgattcggcaagcatgcattttatcactatcataaggctcaagcactttttgaagtagggaggcgtcggtaatatcaacatcaagccatgcttcgcggttgccttcttctaaaataacaggcatgcggtcgtggtattttgccactagctcattggggcgcgtggtaataatcgtgcaggaagagaccgcctcgccgctttcgctgtcttgccacgtgtcccataatccagcaaacgtcatgagccgcccattttcgttttgaaagtggaatggggttttatcactcgtccattcataaaagccatcggcgacaatgaggcagcgtttacgggggagcaagtgtttaaaaggcatcgtatcggcaatggtttccgccctagcattaatcggtttagggcctttgttcttctgttttgaccaatgagggataaggccccaatgaaaaaagcatgcttttggcgccgtatgaatggcagcgatcgcaagaatctcttcggtaggcgcaatgttatggctaggtggaaacgacggaatctcaatgcctaactcctcttcaacgtcagtaggtgaggcagttagcgtaaaacgtccacacatacagcaaacctcctttttaacaagtatatccctttttgcttattccatagacaagcctacataacaagtggacaaacttggcatatttcgttcagttcgtccatatatctgtaaaaagcgtttagcagcttagagaacacgaacattcacataggacaaaatcgcaatctttgaaaaggagtgtctgcacatgcgtaaatttcgcttgatcccgtataagcaggttgacaaggcaagtgctttatctgaagtgccgatgggggtcgaaatcgttgaagcacctgctgtgtggaaagcttcaggcaaaggagccggccaaattattggcgtaatcgacactggttgccaagtcgatcatcctgatctggctgaaagaattatcggcggtgtcaatttgacaactgactatggcggagatgaaacgaatttttcagacaacaatgggcatgggacacatgtggcagggactgttgctgctgcagaaacagggagcggcgtcgttggagttgctccgaaagcggacttattcattataaaggcgctgagtggcgatggcagtggggaaatgggctggattgccaatgcgatacgctatgcagtggattggcgcggccctaagggcgaacagatgcgtatcattacgatgtctcttggtggccccactgacagtgaagagcttcatgatgcagtcaagtatgctgtgagccacaatgtgtcggttgtatgtgctgctggaaacgaaggggatggccgtgaagacacaaacgaatttgcttatcccgcagcatacaatgaagtgattgctgtaggtgctgttgacttcgatttgcggctaagcgattttacgaatacgaacgaggaaattgacattgttgcgcctggagtaggcattaagtcaacgtaccttgacagtggttatgccgagttgtcaggcacatcaatggcagcgccccacgtcgctggagctttggcattaattattaatctagcagaagatgcctttaagcgcagtttatcggaaacagaaatttatgcgcaacttgtcagacgggcgacgccaattggttttactgcgcaagcggaaggcaacgggtttttaacattaggcttagttgagcgtattactggccagtttactgagaaaggcaaaaaataaggtcgtgggataaccacacagcaaacactctctcttcgaacatgcagggggagtgtttgcatctgcatcgctttgagctgttttgctaaaaatagcgcatctcgataaggaaatttagtatactgaaaagaagtttaatgtttcgaggtgctgtcatgaaggcaatgttacttggcattttagccgcttttttcttttcatttacctttttattgaaccgaatgatggaagttgaaggtggaagttggttgtttagcgcgtcattgcgctttttgtttatgttgccatttttgttggttatcgtttatatccgaacgggattcaaagcactgtggctgtcggtgcgcaaaaaccctttcccttggtttggttggagttttgtcgggttcgtcttgttttatgcgccgcttacgtttgcttcaggctatgcgcctggctggcttgttgctggtactttccaattgacgattgttgccggcttgctgctgtcgccgcttttttatcatgtttcagcagatggcagcagaatcaggcaaacgattcccttacggtcgcttttgtcttcggccgttattttcgtaggcgtcgtctttattcaagcacagcatgcgaccagtatttctggaaacttgttgttctcagtcgcgcctgttatcgttgctgcatttgcttacccactcggtaacagaaagatgatggaacttactgatggacgtatcgacaccttttcccgtgttctggggatgaccgtgatgacgacgcctgtatgggtggcattgtttgtgacagggacgattcaacacggattgccgaccgcttcgcaaacaggccaggcattgatcgtcgccatttcttccggaatcattgcaacattgcttttcttttatgcgacagaccgtacacggaaaaaaccaaatcaacttgccgccgtcgaagcaacccaatcaggggaagtcattttcgcactcatattggagcttctctttttgcacgcattgtttccttctccccttgcgcttctagggattggacttattgtcattggcatggcgctgcacagctttctctcacggaaaacagcacagccgggtaacagtagatctagaaagattttggactagagagattaaaacgaaaatcccgaatgcgtacatacgtttctctcaggctgagtgattttggcgacagccgcaaatcgcatctcgcgttttttttgctgaaatgaaaagttgggacaagtaagcggatacaaacggtcggggcaaatctatagaactattacttctctactgttttactaaaaacgcagattttttgcgtgaacatcataacaaaggaaaacatttccgttaaaatacatacgtagagaatagcagtcttagctgccgtatttctaaaatagcatctagtaagtgagtgttctttccatctccctattccgatatacccgcaatcaagtaacattaatgacatcttttagctggcaatagggatccattaagaacatatttcctgacatattaaaaaagtagggaactctagaaagcgcgattcttgttacgaagccacacgttcttccctgaaaaaagaaaaacgtttcttggctaattaagatcattttgaagcgggatgtagcttctttgtaggaggatgcaccgatgaatggagaaaacgaaaggggcaagcttgctgagctaggccaagaagatatgggcagcgataaaaggcaagtcttaattgtcggaagccaggaagaggggggctatgaagcaagttcactagatacaagcctcatgacagaaaaaccgttatatagtggaggggcccaacagatcgaacttgattatgggtcggtagcccagttaggcaatttattggaacgtactgtacaggaaaggttgcttttagtccgtacgcatattaacgatgcgaaggatattacagagcaggagagcgcacgcttcctagaacgagtcaaccaacttcgtgaaatgtatgtcacgctcgttgaacaggcaggggagggcgggctttttcaagggattggccaagcaagtggccgtcttacccaagccatttctggagtgcagcagctcattagcgatgcggaaaggtgttgccgtggccttcgggaagcgcaaacgaatgcacctgaggaattagctggttcggtctcgcaacaggccgtgcaaatggaagacatctttgcggaaattagacatcttgtttctcgcttggaagaaggggctgaccagctatttttgtttgttaatcatgtgtcaatgaattatattgaagatgtgtttaggggcggacaggacctatttgccgactcggtagtcgaagagtttcgcgcccatttggattatattgtccgcaacgaacaacaagtttaccagcaaattgccgattataaagaacaagtcgtatttcttgcccaagcttttacagaacaagatcaaacacgtgcccttgccgatcaatcaagcgcgagcggggcggttaacctagctacccaaggaacgtcctatcctctggaagactcaccttatatgctgtcggcgatggatatccgggaatttcacgctactaacggaattgagcgattgtcaacggcgactgtaccgttgctgtttaacatcttagaagagactgttgtcgctgtaaaaaaactagaacttctcggagaggaagcggtagctgctgtccaggaggcttcgcatgtgcccctatacggcacactttccgtaagtggggaaagcctatttgcttcttatcgtgcctcaatcgaggaaaaagcgctagaggctatgagcttgctcagagaagcgaatactcaagtagctggaattaggcaaggactttattccctccaatggaactatccgtctttacttgaagaattgcgcccacagatcgaagaggttctgtttaatggcatggctttccagagtgttcatgcgtgccactccgctgccagtgatcttttaaatgaaatgcaaatcgcttttaaagatgtggtcttccagctcgcccaaaatcaagctcagtccattgaggagctgcacaacagttctcatatgattgtcgaaaatatggaattgctaaaatcgcaaatgaaacgcgggacaataggctaataagaagcgccttccacacggaaggcgcttcaaactgtaggcaaacgctcgcatacttcgtcgtttgcctcactcatatgctcatgaacccacgttctattcgcatcttccctcggctgcactcctcgtctgacaagcgctttctatcagtctgaggacgcttcttttatgacgactgatggttgcctaatcgtctttcttttaaaccattcattaacacggcaatcgccccgtcacctgttacgtttgcagctgttccaaaactgtcttgagcgaggtaaagggcaatcatcagggcgatcgctccttcctcaaagcctagcatagaagtaaggatgcctgtcgcagccatgactgctccccctggaacaccaggagcggcaatcataatgatgccgagcataaagattacaggaatcattcctgaaaatcccggaaacgccaatcctgggtaaatgtgcataaccgctgtagcagctgttaaaatcgtaatggtgctccctgagagatggatatttgcgcataatggcacgacaaagttcgtgatcgagtcacggatgcggttttttcgaacagcttccagtgtaacaggaatggttgcagcactgctcattgtcccaagcgcggttacatacgcaggcaacatcgcttttagcaacgatagtggattgttacgattaacggctgccgctacggtatattgaataaatagccaaataatgtgcatagccaccgctaaaagcaggacaacgccaaaaacgcctaatgtgttaaagacagtgccttcgtagctcatttccgcaaaaacgccagcgatataaaaaggaagcaacggaataatggccttacgtatgactaattcaacaatgtttttcccttcctcgataaagccatatagtgtacttgaatgtgtggcggcaatcccgatgccgaagacaaaagcaagaagcaacgccgtcaaaacgtcaaaaagcggctcaaccgacagttgcaagaacccctcgatttctgaaggggcgttggcgcctgtcccagcaatccccagtgaaggaataacgttcatcgctacgaaaaccgcaaagaagccggctagaatcgttgacaaatacgaaatgaaaatggtcgagccgagcatctttcctccgcccttgcctagagcagcaatgccagcagcaataaagaacacaataataagcggaaccataaagaaaataaagctgccgatcacgtcttttatcgttaccatcaatttggcaataaactcattggcaacaaagccaatagcaacaccggcaataataccaaaaacaagccgggcaattaatttcacaaacaacactccaatctaaataacggttgttacttgaaaagtacgttgctagtataccattatttagtaggcttcgcattgagagcgttatcattgccgtcctgttgagtgaaagggcaaaaacgtttcattttcaaaaacgcctaagtttggtacgattaagtacatggaggggaaaatatgggaaaattttatcaagaacaattggatttttcagatacgaaaagcattgagcaagcatttacgaaattgttagctgtttctcttgatacgagagaaggacttgaacgctttatggaagaggaatccgtcctccttgatcagttggaggaagcgatcactgggcattatattgattttaactgccataacggttctgaagaagcaaagcgtgcctttgagtatgaccaacaagtgatcgaacctctaatgaagcgttatgaggctaagctcgatgaggcgttcttggcagcgccagctttagcacatttgccagaagagaaatatggcctgtttgtaaaaagaaaacgaaatgcccaacaactttaccgggaagaaaacgtcaagcttgaaattgaagaagcaagcctcgctaccgcctattttgaacataccggttcaatgacagtagactgggacgggcaagagctaaccattccacagctgtctccttattttcagaatgaaaatagggagacccgcaaaaaggccatgtcgttggcgagggaggcgctgctcaaaatcgaagagccattgcaggaaattttttcgaagttgatggtcattaggcagcaaaaagccgagaatgcagggctcgctaattatcgtgattatatgtttaaaaagtacgcccgctttgattacacgcctgaagattgtaaacagctcgctcttagcattgccaaacatgtgaaaccattaaaggaaaagttgcagcgtaagcatgccgcccaacttggcgtcgacacatacaggccgtgggatgtggaagccgttattcccgggcaacagcctttaaagccatttgagggagcagcggaattaattgaaaaagccggaacagcacttgatgcacttgatgctcgttttggcggcctgcttagaagaatggatggagagggcatgcttgacttagagagccgcaaaggcaaatcgcctggaggcttttgtgcgccactgccgatatcaaagctttcgtttatttttatgaaccacgcaaatacacatgatgacatgattacgctattccatgaaatgggccattgcattcataatgacttaaaaaaggaatggcctttgtcgctttaccgtgacacgccgatggaatcaagcgaactggcgagcatgtcgatggagcttatgacaatggaccaatggtcattgttctattcagaagaagacttaaaacgagccaaatacaaacaattaaaaggcattgttgactttttgccagcaggaattgtcattgaccaattccaacattggctctatgaacacccatcgcatagcgaagaagaacgaaatcaaaaataccgtgagctgttagaaacaatagatgccaatgtttctgattggagcggatatgaaaaatggcgggagagcagttggatcagggtgctccatattttcgaagtaccgttttactacgtagaatatgtgattgcccagcttggggcgctgcagttgtataaaaactataaacaagagcctgaacaaacgcttgcccgctataaggaagccctagcacttggcagttcaaaatctcttcatgaagtctacagtgcagctggagtgcgctttgatttttcagcagaaatgattggcgatttaatggcttttgttgaacaagagttaaacgagcttgtctaaagatagactagctgcatcgttttttataaaacatagagaactctagctgcggagaaggagcgcagctgcacatcgcgttcattaatctgaccttttttgactttttttgcccaaaggggttgaaaggtcaatgaaggtcagttataataaagccatagtcaacagcctctttattttaaaggctgtttgtttttactcacgaaggtcaaagatagtcaaaatcaaattccgcttataaataaaaaacaaggaggagaaagtccatgaaatgtcaacattgtcaaactcgtgaggctgtgatttccttgaatgttgttgtaaacaatcgtcaaagccactatgcgctttgccaagagtgctatgcgcagtggagcgattcaaacatgaatggtcaatttgattcgctgtttcagcaatttatgaatcaaggccagccacaacaaaacgttcgtacaaaagagcaaaaacggaccgatgatggtttcctcggtcaatttggccataatttaacaaacgatgcgaaagacggcaaaattgacccagtgattggccgcgaccaagaagtagagcgcgtcattcaagtgttaagccgtcgaacaaaaaataaccctgtgttgatcggggaagcaggcgtcggaaagacagcgattgctgaagggcttgcacggcgaattgccagcggcgatgtgcctgcaaaactgcaaaataaacaaatctatgcgattgacttttcttctctagtcgccggtacaagctaccgcggccagtttgaagaacggatgcagaagttgattgacgaagtcagcagccgtgatgatgtaattgtgtttgtcgatgaacttcacatgatcgtaggcgctggtgcttctggagaaggcaacatggatgcaggcaatttgctcaagccagcgcttgctcgtggaagcatgcaactgattggggcgacaacgctagcagaataccgcaaaattgaaaaggacccggccctggaacgccgcttccaaccggtaacagtcaaagagcctactacaagccaagcgttggcgattttgcaaggtctaaaaggcgtgtatgaaacgtaccacggcgttcgttactcagatgaagtgctagaagcgtgcgttaaactgtcagatcgttatattcaagaccgttatcttccagacaaagcgatcgacctacttgatgaagccggttcccacttgtccttgtcttctaaccatgaagataaagcgacattggagaaacgtcttgctacgatacgcgcgaaaaaacaagaagcaactaaacaagaacggtatgaagaagcggccgcgcttcgggatgaggaactgaaagtacaagcaaaattgcaagaagccgtgtcagaattagaaccagtagatgtcactgttgaagatattgaaatgctgattgaacggcaaacaggcgtacctgtccgtaagttgcagaaagcggagcaacaaaaaatgaaagacttggccaacaggcttgcagccaaagtcattgggcaagaggaagcagtcgacaaagttgccaaagctgtaaaacgaagccgtgctggtttaaaagcaggcaatcgtccaattagttttctgtttgtcggaccgactggcgtcggaaaaacggaattgacgaaacagcttgcccaagaggtgtacggcaagaaagaaagcatgatacgccttgatatgagtgagtttatggagaaacactctgtatctaaactgattggttcccctcctggctatgttggccatgaagaaggcggacagctgacggaacgggtgcgacgcaatccgtacagcatcattttgctggatgaaattgaaaaagcccatcctgatgtgcaacatatgtttttgcaaattatggaggatggccgcttgacggatagccaagggcgtgtcgtttccttcaaggatacaatgatcattatgacgtcaaatgcgggtgttggcgtgacaaaaccatcgcttggttttacagctgaacaaagcaaaacattggggattttggaaaaccttaatgattatttcaaaccagaattccttaaccgctttgatgcattgatcgagtttaaccagctttcagaagaaaacttgattgacattgtcgatgtgatgcttgccgatttgaatgaacggttggcagcgcaaaacattgaaatggaagtgagcgaggaagcgaagcgtaaacttgctaaacttggctaccaccctgcgtttggtgcccgtccgcttcgccgggtgattcaggataccattgaagatgatatcaccgaccttttgatcgatgataacgacttgaagcgcgtaaacgtcgatgtcgtcgacgagcaacttgttgtccgtaaaggataagcgcaaggcaaacggtgatgcgtgcgagcgttagtccgtagtttgcaggctgctgggatcattccagcagccttttttggttgtgcagacactaagctgtgcgaagacttaggcaaaacgagatagatgcgtctctgtttgtacaaaggcttgctggaacaggtcatgcttttaatggtattgttggagcccgcgtacaatcgctgttgcagcttcgtttggaaagctggcggctttcatccgttctgcttcttcagcatttgtaataaatccaagttcgacaagggccgcaggcatggcagtattgcgcaatacactaaaatttgccgatttgacgccgcggtttcttgtatttagtgtgttgacgagttctgtttgcaaagctgaagccaaagcttgtccttggctgcttgatgggaagtggaatgtttctgtcccatgggcacttggggtagctgcattggcatgaatgctaacaaatgtatcggcattacgggcattagcaagttcggccctggcttcgagcccaacatatacgtcccctgttctcgtcataatgactgttgcccctgcctcttccagcctatctttcgtatgcgcagctacttttaaaacaagatctttctcggaaattccatttgcgactgccccaggatcgcttccaccgtggcccgcatcaatggcaatgactttaccagatacactagccgccgcttctgatgctagaaaatagctagtggagactactgcaaggatggcggccatcaaaaatgaaaaagcatgcttttttctcatgagcgcctccttggtttttatcgcttggcttattagtagtctaagagattgctatagaggcaacaagggattttgtcgaaaacagcccttcctgattaaaatgaagggaaaatatgtatccaaagagaaaaacatgaagaatcacagtggttaagttttatgaaagcaaggaaaagcgtctgaacagaggtgactagtaacggttcaagatcgcctagttaggaagctgtttagctcatttcaatcttttgtcccaggtagatatggtaacgaagtaacaaatcggcttaatttctcgtttttcggcaatcatagatgtttcaaattttgcgagcaaggcgcaaaatatgaaattagcaaattggaaaactatagtaaaataagtactaaaacctagacctttaggcttgtaatcggaggagaaacgatgaaatcaaatttagaagcataccggattatgaatgacatttatcgtctattgcgccaagaggtaggctctccgacgtctacgtttcgtgaagtggtagattttgcgattgtaaagctacgcgggcgaatggaagacaaagaattaagtcgcctctggcatatcgtttacttgcgtcaagacatgatgaatttcgagacgatctcccgcagccaagtcgagtacttaaaagctgttcgcaaagctttaatgaaagcgctaaaaaagcaggacgatgataatgagatctgcgtataaaaaacgcagaagcagtgctcaagagggggagaaggggaggaacggcttaactaaaccatattggcagataattcggaatataaatcgttgaacgatttccttattttattctaagataacgttttttgttaggccaattagcaggcttttgcgtaatactggcaatggggtgctatacaatgcatttgctataagcagtctggttatggctattgatggctagaaacagtcatgtattagaagtgctttgctgtttttaacagatagctacaaaaacaaaggaatattgacagtctttgcaaaataactggaaggaaacccaattgttgcggaaaataggtaaccgttattttttaaacttcatgtccaatgataaattgtttatggctaagcgagaggaggtgacaaaaaagcgggggtctgcacaagaaaaattatagggggttatttgaacaggccaaagctaggagtttggaggcagaacgcagctggtggttaaagcgttgattgtaggaaagggcttggggtttagtctactcttgttctttatataaagccccttttatggactcacttataatagcaattagaggttatgggggagatggcgtagcaggttgatacggcgaatatgcgggatgccgctagatcattcactaagagggttttttatggatatgctgacagataaacgcattgagcgcttagtgaaattgattcatttcattggcgccaaagagaactgcacgaaggcggaaatccgtaaaacattggcttgttcggaccgcacggttgattatacgataaaagaattggaaaaagaactacagcaaacgggcacagacatggcgattgtgcgcaatgctcataatcaatatagtttttcaaataaagatgaccggcagcttaatgaagttttgcgtcgtctcttttttcaggatgatatggtccgttttattggctgctctttatctggccgcttaagtgtggattcgtttattcaaaaacatttcttaagccgttctacattcttccgtaagctccataaaatcaaacctttgcttcatgctttccatctgcggtttgagccaaggacgtttaaacttattggcaaagaacatcatatccgcattttttatttttgctttttttgggaagtgaccggaagtggaattgcgtggcctttttcgattgaaaaacagtgggctaaacaattgtttgcgccgattgcaaaggcaatgaagttaaacttgtcctcattgcaaacagaacgtttcttgtactggattgctatccaatggttgcgagtaaaacaagggcacttcactgacctttatgatgaggcatttccgtccgacttgcaaacaaagatgcttgcacatgctggagaattgcttaaaaccgtgccggaaaacataaggtcatcagaagtgcagtttttattgatcattcttttaaattcgccatttctctaccatgacgcggagcttgtcgcttcaaatctagctgcaaaccagttacaccgcactgaagagtggagggccacgcggcggttcgcccgtgcattaaaaaaatggttttctaatgcattagacgaagaagcggcgcagcggatggaagggcatttgctacaaatccaccgaaataaacggtacttttccgtgaactattcgagttttaaagagcggattcaactagacgtattgcaagaacgtcatccgcttattacagaaggcgtttttgctgcttttgaaaaagtcttggctgaggaaatggtgccttttttgcaaatggatcaagctgctttgctcatccgttatattttactagtctatacatttgccgacattgagaaattaaatgaaccattgaatatccacatcttttcaagtgaagggcctgtctatgagcaaaagctttctgaacgaatgaatgctgcattgccgtaccatttaaacgtccaaacgtccgtaacgtacacccgtgacaaagcagaaatgcctgcattcattgtgacagatacactttttccctatcatgaaaaagtcgatgttgtttatatccagtctccaccaacgaaccaagactggcgacggatccaacaacattgtgaaaaacaccacaaaagggcgattgagtcgatccttcttaaacgaaaagagcagcaagagacggaacaccttttcaaaagggaaatgaatgggggataaaaaacctgcaaggctaagcaagaaccttgcaggttttataggttgtagacttgttcttgttcatgggccgccgaacgtccgttaggtcacatctccgctcgcctacacttctcccgccttctatgtgtgaagaaaaaaaccattggaaagccaaaagcacagttgtccactataaagggggcgtgccaagagacatttatgtgttttgaccagctgtgtgcagcatgcctctgcggaataattcgttttttaaaatcacaataaaatcaacggataattgatgttcgatcgcttggtagtatgaatggagcagaaggtcgtctgataaatctttcagcatacgatatccccctctgttatgtggtgagaaatgttggctatgtgtgccctaatattactacatatagtatttaatatcaataaaaaaccctatatatatgattggtgatcgtttaattcgaccatgtaatagcggagcgttttttcaacatttctagaaaggacgaacggcgcaccgccaactgaatattttactcctttaacccaataaaggtgttcgatataatggggagacaaggatgctttttcagaaacatggatagcgtgtttttgcataaagtcttttagttttctcatgtcgatggagaggcgggcgagtgctcgttgaatgatgtttatatagatagaagggtatttaatgcctgccacttgtttcccttggaaacgcaccaattcccgcgtcaaaatgatgcgcgcataatgcaagcggatataggcttgcgccgccttttccgctttttcgctaatggtttcccgggcggttggggcaagcccaaacagggctcgcacttggttgttggacaggtccatgttcaaacggggctgacatgtttgatgatacgcaaaggaagccactcgcacctatctggaaaagcgattttgattcgcttgttccattcgtccaatttatcaatagtgccaattttttggcggtagcgtccgtgatcccaataagtgacagtcacctcatacgtgtgatttaacgcgtccatgatggtagcccctagctcgcgccattcgtcatcgtccaactctccatgcaacggaacgtcctcttcctgccgttgaagttcaatccatgcctgtttatgctcaggcagcatcatccgacttccttcccataacaagtttcctcgatggatgtaccactcttcttttcccatcagcaaactcctttcttattggaacgtttgtttgtattgtatgcgaatgtccgttcgataacaagaggaaaatagaggaaaaagactggttcttttctggatgggaacagcgtaaatgtaagaaggaaacgtcgtgcctgttagcaccatgaaaacagctatcgcatttcttgaatacgtgcaataaaatgggcaaattgtgttatgatgttgcttaaggcttatggtaagatgaaatttttgcgaaaaacaagggaagaggagacgttgtatgaaactaactgcgaccatgccttcggagcggattcacgagttggacatgatccggggaattgccttgttcggcattttaatggcaaacatgattgcctttaaaacgttagcttttaccgatgcgagctctatgcttgaggggaaagccctgtctgaaaaccgcttggacgccaatgtacagctgtttatcagtttttttgtagacggcaagttttacccgatgttttctttgctgtttggacttgggttttttattttttatacccgcgttctagcgaaaaatatggcagcaacacgggttttttataggcggatcgtctttttgctagtggtcggtcttgtgcatttgctgctcttatggtcaggagacatcttgtatacatatgcattaacagctttgctcttgccattgttcttccaccgcaagcaaaagacgctcattacttggacgatcgctctaatgcttgtttccgcagtaacgatgacatgctacatgttgtttttaggagttagcatggaatttggcttacgggaagggctcatgacaatggaagacattgctggcgatacggctagtgctttagcaacaatggcgaacggcacctatttacaaatagtagaatatcgcttttttaatgaatcatttttccaacttttcaccgttatctttgtcataccaggaattttgccgttgtttttaattggcttatcgatggggaaggcaggaatgttccatgatgggaaagccaacgtaacacgctggaaaaggctgtgctggattggcttcttggcgggtttgccccttacgttgcttgaagtgtcgatcagatacaatttaatcgacatcaatcctgtgtttacacaagggttggccgagggcatcagaatgcttgctggcccgttgcaaatgttgttttatgtatcagcatttgtgctccttttacagaaaggaacagtggcacggttgttcatgccaattgcttcggcggggcgcatggccttgacgaattatttgctgcaaacgattgtggcaacgaccatcttttatgggtatggctttgggttgtttggcagcgtctctagcagccaagggttacttattgccattgtcatttatgctacgcaagttatacttagccacttgtatttaaaaaaatggaaacaagggccccttgaagctttatggcggaaatggacatatagcggcggggcggccaaacgtaccgcataaagagccatttgggcaatcgcccaaatggctcttagcctgaaaaagcaccccttttacaacgagtttcgcttacaacctcatccgagccatactggactaaacctcaaaatctgctaacatttgaaagctactggaagaacttctgacaaattaaaggcgatattaaagagggatttgcctttataacatcgaaatggtcttaaaaaccgaaactttttaaagttaaaacgaaaagtgaggtggcgaaaagattaagcctccggtgcaattgcatgaagtcaatcgaattaatgcgttaaaccttatccgcctacgcgggcccctttccaagaacatgattgccaaacaaatacaagtcagcccaacgacggccgcaacgattttaaacaaacttattgacgaagggtatgtgcaagaagaaggggtcggccattcaacaggtggaagaaagccggtgctttaccgctttaatccagacaaatcgtttataatcgccttgtcactggcaaactcatccgttcgcatcgctgctttgaatttagaagggcatgtccgctccgaacaatatggacaagtcgattcgctccgtggcgaagcttatatcgattttgttatgaaaacgctatctgaatttattggccggtttgaaaagctggacgaatgtttgggcatttcgattgttgtcccaggaattgtccaagccgaacgaggtatcgtatcttataatgcaaaacttgacttgtatgacgttcatttaaaacaaaaagtggaagcggcatttggcttgcgaacgtatgtagacaatgacatgaatgcgatgatgatggcagaaaagcagtttggcacagcgagatataaagaaatgttgtttatttcagtaggcgagggggttggttcagggttgagcgtaaacggcagcatttaccgcggcttcagcggcagtgctggcgaaattggtcacatgtccgttttgcctggtggtcctgcttgcccttgtggcaaccaaggctgtcttgaaaactatgtgaattggccagctatttattcacgaatcctctctgcctggctcacacaaggcgtgaaaacggccatcattgagagcgccgctgggcggccagaagcaatcaaaccaacggactttgttgaagccgcttgcgcaggcgacccgtttgcgctaacggttgtcgaggaaatggcagaatctctggcggtagcaattaccaatagtttgcacttattgaatccacaagcagttgtgttgactgggcctcatgtgcaaaacaacctgcctttgtttaaacgccttaatgaaaaaatcaacagccgggcattgaatccaattgcgcgccacacggaagtaaaaccggcctctctggaaacaaataaagacattcttggcgcgttagcagttttgttgcaatacgaaatgcaagttggcaagtatgagctgtttttacctgaggcaaatgattaaggaggcaaagcatgaaaaaagcgatcgctttagtaatgctagtcgcagtactttcggtggcggggtgtcagagtgaacgggcaagtccgcggcagcagacgcttgatattgcattatgggatgaaaaggcgaagccggcagttgatgaagcaattgccgcctttgaaaacaagcatccagatgtccgtgtcaatgtaacttatagcccttactctcaatattggacaacccttaggacgagcataggaggaggggcagggccagacctattttggatgaatgccgtcaacttccaccaatatgcagagcctggcttgcttcaaagccttgagccatttattgccgaggacgaaacgtttcaaaaacagcattactatgagagcatgattgaactttacagttatgaaaatgacctattcggggcgccctactttgtcgatgctgtcggcttgttttacaacaaagcgctttttgatgaagcaggtatcccctatccagatgagacttgggattgggaagacatcgagcgggttggcgctcagctgacagacgccgataaaggggtttatggatacgcagcgccgattgttagcaaccagcgaggctattacaattacatccaccaagcgggcggggaaattgttagcgaagaccaggcgcattctggttttggcactgccgcggcgaaagaagcgtttgcctttatagaacgactagtcgaccaaggcatttcgccagatattaagtcgcaaattgaaaatgacctcgatcaaatgtttatgtctgataaagtggctatgtatccaacgctctcagttagcgctgtcttgtttcatgaggaaatgggcaacaaagtcgatgtcgcgccattgccgaaagggaaagaagatgctgtgattctacacgggattagttggacgatgaataaaaaaacggagcaccctgaacttgcctgggaactaattaaggagttaacaggcgaagcaggcaacgaaacgattgccaaaagcggcttttccacacctgctgcgcgctctgcaggcgatctctggcttgaatcgatcccagacatggatttgcacgtttttatcgctgcgcaagaaaccggagtggcgtatccggtttcaaaaaacacaatggagtggcagcggatggagcaaacagaaattcaaggcgctttcctttcaggggaaccccttgacgatgcacttgaccgagttgctacagaaatggagcgaattttgcggcaaggacaagagtctgaataggagggagatgtcatgataagcgaagcgggaaaacccccaggtatgcgagcaacacctaaagcggggaaacgaaaaagcaaaggggcaaaagaggcgctatgggcgcttttgtttatcagcccaacgttcatcggcttgtttgccttttatctcggcccggcgattgcttcatttgccctttcctttacacattgggatgggctaacgccgcctactttcgctgggtgggagaacttcagcgcgctgctctcgagcccggtgtttatccggtcgctcgttaatacacttctttttatgcttgtcgctgtgcccgcttctgtggcgcttgccacatgtatagctgtgctgctaaaccaaaaaatcaaaggcatggttgtctatcgtgccctttattttttgcctgtcgtgacaatgccgatcgccgtcggaatggtttggaaatggctttataatacggagtacggtttggtgaactatgttctcggctttctcggcttgcctcaacctgaatggctatttgatccgaatatcgctttgcttagtgtgatcgctgtatatgtctggatgacagtcggcaataacatcattttaatcgtggcggggctccagcatgttgatcctacttactacgaggcagcagcgatagacggggcgtccaaacgcagtcaattttttcgtattacgttgcctttgctgacgccgacgctgttttttgtcgtcattacagccatgattagttcgttgcaagtatttgatttgatctttgtaatgatcggcgacacgacggcgctagtcggcccgctgcgcacgatggtgtatggcgtttatgaatcagggtttatgttttcacaaatgggctatgcgtcagcgcaagcgttcctgttgttccttcttattttggcaatgacagtcatacagtttgctgggcaaaaaaagtgggttcattacgacggataattaaggagaggagcggtggtcatcgtgagaaaaggagtggttcatcttcttctaattgccggggccattatgatggtcaccccgtttttatggatggtgactacctcattgaagacgtatttagaatcgatgcaaattccgccaaccatttggccggaaacgtggcgttttgacaacttcgcccgtgtgtttgagagcgccgatttcctgcgttattatgccaacacgatttttatcacagtgttacgcacaggcgcacagcttttcctttgttcaatggcagcctatgcgtttgcccgcttgaattttccgtttaaaaacacgctttttctcttaatgttgtctgttctgatggtgccgatgcaagtgattttgattccaaactatgcgctattagcacaattaggctggattgatacattttatgcccttattgtgccaggcatgtttagcgcgttcggtgttttcctgttgcggcaattttttatggggatcccgaaagagcttgatgaagcggcgatcatggatggctgtacgcactggggcatctattggcggattattttgcccaatgccaaaccggcactcgtggcactggccatttttacagtgcttgcagcttggaatgattttctgtggccgcttgtaatgaccaattccgctgatatgagggttttgtcggtagggatcgccaattttgaagggcagtattcaaccgagtatccgctcttgatggccgcggcgctcatgtcgactgtgccgatgctgctcatgtttttatttttacaaaaacatttaattgcaggaattgcactagggggagtacgaagatagtagagcaagccagtaaaaatcgatttggacaaaggggatgggaagatggttcgtgtagtagttgtcggacttggaacgatgggggctgtccacgcacgcagtttcgcgaaaatggaaaatgcagaccttatcggcgttgtcgatataaacgaaagccgagcagattcgtttgcgaaagaactggatacattgggattttattcgtttactgatgcgaaacaagcgctcggggaacgcattgatgtagtgtcagtttgcttgccgacagacttgcatccttcctatgtgaaagaggcggccaatataggcgcagatgttatctgtgagaaaccgcttgcgcgtacggctaaagcggcagaggagatcgtccgttactgcaagaaaaagggagccagattgttcgttggccatgtagtccgctttttcccagaataccgaaaggcaaaagaagtggttgaggccgggcgaattggcgatgttggcgtcgttcggacgacaaggggcggcgctttcccaaaagcaagcgaaaattggtatgcggactatgatcgcagcggtggtgttgtcctcgatttattggtccatgattttgactttttgcgttggacattcggcgaagtagagcgaatctatgcgaaaaatatcggcggcgtagctggcattaatgagcaggcaaaagagtatgcgctcgtatcgattcggtttaaaagcggcgtgattgcccatttggaagggtcatgggcccataagcaatttagaacgtcgtttgaatttgccgggcgcgatggcattttagcttatgatagccagagcgcgcaaccgctaatcgccgaaaaaagcgacgcaggaaaagcaggtggcgtggctgtaccagaaagcccactcaaacagtcgccttatgaacaagaactccgtcattttattgcgtgcattgaaaaaaatgagcaaccgcttgttaccgcagaagatgcgtaccgagccgttgaaatcgcagaagccgcattagagtcgattaaacaagataagcccatcacgttgcatgtgcaaacggtgctgtcataacgagaaagaggaggagatgaagtgagagtaggaataatcagttttgcgcacggtcatgcctattcatatgcgtcgagtttacggaacatagaagatgtcgaattggtaggaatcgctgatgatgaccaagaaaggggaaaacaagccgcgaaaacatatgaaacggcctattaccctacctaccaagcgttgcttgccgaaaaacttgacgcagtcgttgtgacaagtgagaacagtcgccataaagaacatgcagtggcagcggcaagagcaaaagctgctgtattatgcgaaaagcctcttgcctctacagccgaagatgcacaagaaatcattgacgtttgcaacgaagaaggcgtgctcttgcaaaccgcttttccagtaaggttcaatgaagccgtagcccgtgccaaacagcgcattgatgccggtgaatttggggatatagtggcgattaaagggacaaaccgtggcaaaaatccaggcggatggttcaatgacgaggagttagcaggcggaggcgcggtaatcgaccatactgtccatatcgtcgatattatgaggtgggtgctggatgatgaggtggcacaagtatacgcagaagtagaccaattgttttccggcaacggcgttgatgatgctggattgctgacattcacctttcacaatggcgtgttcgccactcttgactgtagttggtcgagaaatgaccatttccccatttggggagacgtgaccattgagtttattggcacgaaagggaccttaaaagtggatgcccaagggcaaaagtttgatgtgttccatggcagcgggctcagctacacgtattggggagatgacatggacgacgggcttatccgcgactttattgccagcgtccaaacaaaccaggccccgtccattagtgggactgacggtttgcgcgcgcttgaagtcgcattaggtgcctatgaggcggccgctacaaaagaagtcgttgtcctccaaggaaaggagaacgaaggccatgaaaaaagggattaaccaatggtgttatccaccagagacaacgctcgaaaatgtcttaaaatggacaaaagcagcggggtttgaggcgattgagctcaatgtcagccagccaggggcaatcggcttgacattggagacgagccatgcagaagcaaagcaaatcaaacaagcgattgcagctcatggactagaaacggacagcctttccactgccttgctctgggaattccctctgtcgtcagcggacagcgctattcaagaggaaggcaagcgcatcgtccgaaaaatgttggagttggcctctgccatcgaggcaagtacgatccttgtcgttccaggcgttgtaacaaaggaaacgccttatgatgtttgctatcagaacagcattgctgctttaagaacgttgttgccgtatgcggaggagctaggcgtcgctattggaattgaaaacgtctggaatcgctttttgttgtcgccccttgagatgaagacgtttattgattcactgcaatcagagcatgctggcgcttattttgacgtaggcaatgtattgccattcggttatcctgagcagtggatccgcattttaggcaagcggattttaaaagttcatgtcaaggattttaaagaaacgattgggaacatgaatggatttacgaacttgcttgccggtgacgttgattttaaaagggtgatcgccgaactcaaggccattggctatgatggggaagtaactgctgaactgaccccgtacaaagagcatccttttgcgctcgcgtacgatacggcacggcaacttgatgtgttgctcggacacgattctctcgtcagcctgtagacaaacgctcgctatacaacctcaaacatggagcgcaatggtcgcgctccatgttgcagcctatagacaagtttttctatccgtctaggcgaggtttctcatggagtatgcctgctatgtttgataaatgtcttctaaaaatggcacaagctcttgcatcatagcgtctggctgctcttcaggaacataatgaccacaaccagcaagctctttccctgtaaccatcgtcgctacttctttccatatcgtaagcacaggctgaccagccaaattcccgttttccccccaaagcagcaaacaaggttgattgatgtttttattcatttctttttctactcgatagttcggtaaatcaagcttgtgcgccgcacgataatcgttcagagcggcttgaaaaccacctggttgcttccaaatacgtacgtattcatcccaaactccgtcagcttttaattgctccagtaaatggggcgttcgtttaaacaaagccccaagataaacctcttcccgacctgcaatgagcgcttcaggcaactctgcgactacttgaaaaacccaatgccaatattttttagccgcttccgaggcagaaaggttgtcataaacatattccaaaggaagaatatcgatgaggcaaaggcttgctacatagtcaggataatctaaggcgaatcttctggctactctagccccacggtcatgcccaatcaaagtcactttttctaatcgtaaatgggtcacaaggtcataaatatctttggccatgttcgctttcgtatagccttctattccttctggtttatccgaatccccatagcctctcaaatcgacagcgagtacacgataacgctttactaaatcgggaataacgaacctccataagacccaactttgtgggaagccatgcaataagacaaccgtattagaatgctgctcccctccttcaacatagtgtagttgaatcccattcacgtgagcatagcgatgcttcagttggcataactgaaaatcattccaagcatccatttgtctagcgcctccttttgctatctttatagcaatacaattgcattgtaagccctttcctttataatttaaaatgattaaatttaaaggtatcgatcatttttagtgatatggaataggcgaacaacgatgttaaaacaaaggagacggtaaaggtggatattaaagacctgcttatatttaaaacattagctcagcaaaaaaatattacgaagactgcggagcagcttaactatgtccaatcaaatgtaacagcaagaataaaaaagcttgaggaaacattagggactaagctgttttatcgtcatccacggggagtaagtttaactggtaaagggcgcattttgttgaagaaagcagaacaaatcttattgctcatcaacgaaaccgagaaaatgatccaagatgatgacgaaccaaatgggtcactatcgttaggaacaaacgaaacaacagcagcgacacggctgccgcagttattagtgacatacaataagcaataccctaaagttgaactatcgttacgcgttgccttaacacatgaactcattgccgatgtacttgattacaaactcgacggggcctttgtgcttggccccatacatgatcagcagcttcaggcgattccagtctttcaagaagaacttgtcattgtatcaaaatcaacagcgttgactgaatggcatacacgaaacgtcttaacacggccatgttgtccttataaagggaaactcgatcaatggctggaaacacaaggctatcgccctgatcgtattattgaatttggcacgcttgagtcgatcattcattgtgttcaagcaggcctaggaatggctattatcccaaagtcattagtattgaaacagtttgcggaaaaggatataacgatacattccttacctgaacctaatcaaatgattaatcttttctttattcatcgaaaggatacgtatcttgacaaagcttatctcgcatttctggaattcttgcaaacctaaaaggtgacatccttcatcccactttttttggtctgtcaccatctaaggattttcctgaatcaaaaataagacatggagcacaacaatggcttcatgtcagaaaataagggcacaaaccgttctgtggataagataccgctgtttgtttataaatataagatgaatagtggacaaacgtggtgtatatgtgtatatgttgatggttcatgtggataatctctacggtctgtggacaatattgtggaaaagaacgcggcttcaattgtactacaggatgtgctccacttttattgtacggtgtagccgccatccacaacgagtgtttgtcctgtaatgccttttgcctcagcagaagagaggtatatcgccaaactagcgacttcttccacagtaatcaagcgtttttgtggaacaagtggataaataacatcatctaacactttttctaccggcacttggcgggatttcgccaaagcttccatttgattgcggacaaggggggtgtcaatatatcctggggcaatgcagttaacggttattccgtcttcagccgtttcgagggcagcgactttcgataggccaataatgccatgttttgcgctgttataagccgccttaccagaaaagccaattaagccgttaatggaagacatgttgataatccggccaaactgttgtttcctcataatgggcatgacgtgtttaattgccataaatgggccaacaagcataatgtcaacgaggagcttgtatgtctctgttggaaagtcttcaatcggtgatacatgttgcatgcctgcgttgttaataagcacatcaattcgtccaaaacaagcaactgttttttgaaccatcgcttttacttcgttctcattcgtaacgtctgtttggatgcctttagcaacgtagccgttttccgtcaatgccaatgtcgctttgtgcaagctgtcagcatgcacatcggcaaccataacgctcgctccttcagcggcaaaacgttgagctaaatgaaagccgatcccgcttgctgcaccagtaatcagtacaaccgttcctttcatcataaaacctccaataggcgctgtgaaatggccaatagactgaaagaagtgcgtcttcgtttacaggcataaaaaaaacacttcttttttatcaaagtgccaaaaaacatatgttcgtttgttgcagcagctaaagagaaaaatcgcttcctttattttcttattattagtataaaatatttctgaatataagtctatatttttattctcctacttcataaaataaaaggcacctggccaggaatacagtgaaaagaggagcattgcgtgtattggaaacgccttgatcggaatctgaaagtgcgtttagtcggtgaagggctgtttaacatttgttactggatgtattttccgtttattgctctctattttagcatgactttgggcagtgaagttgctggagcatttatgatgcttccgcctcttgtcagcatgatcggaaatttggcaagtggaaatctagccgaccatttcggacggcgtcctatcctaataggaggggcggctatacaaacagtgatgtttgttttctttgcttgttccttttccccttggcttgattatgctgcatttatcggcattgcgcttggaagcgctctataccgtgcgccaagtctggcaatggtagctgatgtcgtacctgaagaggagaggcgcgacgtatttgcgctatttgcaacgacgaacaatatgggtgctgtcgtcggtccagtaatgggagcttttctcttttttcaatttcgccaaatactgctatggacgaccgcaagtgtattactgctttatttattgtgcctaattttgtttgtcaacgaaacaaaaccaacaagcacacatgaaaaacaagtttctgttatcgctggggtgaagcatgcttgcgttgcatacaggcatattttgggcgaccgggtgtttgcccgttttattattgccggtgttttctccgttatgaccatcatgcaactagacttgtatttggcctattacattgtgacggaaataccagatcagcgcttcttattttttgaattaggtagtatgttgctgacaggcgagaccattctaggttggatgctagccttaaacggcctgctgtttgttatgctcgtttttccgcttgccaattggacaaaaaggtggaaagaacgagatctgtttgtcttctcctgcttgctctcaggtatcggcatgtttgcactcggtttcgtgtcgacgatttggtcattgttattattgaccgttgtctttacagtcggtgaactattgcgagcgccaatttctgatagttttgtaagtcgttatgcgcctatggaatcaggggcaatgtacattggcgcttccaatttacaatatacagttggacgaatgctagccccccttacgattttatttgctacatgggtggctccgttagggatattttttttcatgcttgtttgttcactggcgagcgcggcattgtataccaacttgtttcggatcatttctcaaaacaaagagaagcatgaacggagcagttgagcgatatcgtttttatgtctgctctgctgcaaaatttgatgataggagaataaaccaaaaaaatgtgcacccttttcgcaaggggtgcacatttttattcggcttgtgtttgtttgctgcgcttgataaaaaatgaaagaacgactgctgcacaagcaaaaaagaaaccagtagagaagctttgttgggaaccgtatatgagcgcttcgaccgtctgttcagcagtcggctcgctaatgcctaaattagccaaataacgttgttggccgttttccatgacagaaataaacaaagcggcgccgattgcgccagcgacttgcataagcgtgttcataatcgctgttccgtgagggtaaagtcttgctggcagttggttaagcccgtttgtattggtaggcatcataatcatggcgacagcaaccattagaatcgccagttggacaatgacgagccaaactggcacacctggcgttgtatagcggtagctaaacacaatcgcagcaaggataatggtgcctggaattaacagcggccgcggaccaaatttgtcaaaaagccgtcccattaccggagaaagggcaccattgagaagcccgcctgggagcataatgagcccagctgtaacagccgtaaataacaatgccccttgcatataaatcggcataatgagcatcatcgcaaacattgtcatcatgacgagcatcacgacaataaggccaattagaaacatcgggtagcggaaaacacgtatgtctaacagcggcgtttccaatttcagttggcgccagccaaaaatgcagaggctcgcaaaaccaattaacagagtcgaatagacgagggggtctgtaaaagaggcgtcccctttgcctgccgcactaaagccaaagacaattccaccaaaaccgagtgtcgaaaggataaacgaaacgacatcaagtttcggccgtgatgtctctccgatattgcgtaaaacttttacgccaaatagcaacgacaataaagagatgggcgtaataaaataaaaaagccagcgccatgacaggctatcgacaatgataccagacacagtcggtccgattgctggggcaaacataatgacaagtccgaccatccccatggcagcgcctcggcgctcgattggaataacagctaaaatgacgttcgtgagcaggggaatcatgagcgctgtcccgactgcctgcgtcaaccggccgacaagcaacatagcaaatactggactaaatccagctattaatgtgccgagtgtaaacagcgacatcgctgtaataaacaattgccgcgtcgtaaaacgttgcataaaatacgcagagatggggattaatgtgcctattactaacatatagcctgtaacaagccattgggctgtactggaagccacaccaaaatcgctcataatagcgtttaaggcaacatttaaaatggtttcgcttaagatagcgacaaatgccccagataataatacagcaagtaaaggcagcactttgacttgtacggtttccgtcgtcgctgccgccgatggttcttgtgaaacgtgagccattttggagattctccttccttataaaacatacggaacgcgtgcgttcagctaagttatcttaccacctccaattacgaaacgcaatagaatcgtatttgctcgcaaaattaggaaatggtatgatgaaatgtaaggagttgttaggagatttgaggaaaggcggtagcattcatggggcaaaacggggagcaacaacaaaaagaggaagggaagcgcggtcgtccccttgacctttcgttgaataaagcaatcttagaagctacactcgacttgctagcgcagcatgggtttgacgccctcaccattgaagcaatcgcccaacgggccaaagtaggaaaagcgacgatttacaggcgttggtgttcaaaagtggagcttgtcattgacgctgcttcgttcatgagcccgtatgagacattgttagaacaattggacaaaagcaaagggctgcgggagcagttaattgatttgctctcgaccacgttccaaaatgagcatgaaacgcatcaacaggctatggcgcaaattggctctgcgctcgccaatcacagtgacctagaacaagggttgcatacccattttaatagcctgcatcgctctgcggtggaagcggttatttctccatttctaaaggaaggccaccagcttgcaacaaaagatttggatttgctttccgatgtcggccctgccttaatgatgtaccgggcttggattatccgcaaaccgtttgatcgttcttatatagagcggattgtggaccggctcatgatgcccttgcttgaggaatggatataagtaaaacaatccgctggattgccagcggattgtttttgctattttataggtattttgtagccaaccaccataagccgtttgtaatcggcgatccactgcccttcttccatcagaactggttgaagggcgatttctgttttggcgataatcgcttgtttgtcctgttcatcgatttcgttaaagaaaggatttgcaaacatttcaagccaattgcggaagccgtctgctccttctaatggggttggccgttcataaagccgggcaaatgaaacggaaaagcctgttttctccattaaagaagtatattccccaatggaagggaaataccaagggaattgcttgctcgaatatggatatcctgcctgcttaatttgagcaactaattccgttgtgatcgtttcaacgttccctttgccgccgaattcggcgacaaaacgccctcctggttttagtgccctccatatgctttttaatgcggcttccgcgtctaatacccaatgcaagaccgcattggataagacggcatcgaacgtttcagtgaaaggcaggttggtggcatcggccatgtcaaataaaaggtgtggatattttgaacgggccttagcaaccatattcgacgattggtcgacgcctgtgacgactgccccaagtttggccaactcatttgctaaatcgccagtccctgagccgagatcaaggatggcttccttttttgttggctgcaataattcgagaagatggtttccgaattttgagacaaatgcatggcgattatcgtacaaattagagttccagtggtcattgaatggggatcgtttgttcatatcagcattctcctttccttgattataacgaaaaagaaagactagaaaaagcattgttttgagaatggagtgtggaggatgaatagcatcaataagctttgacaaactatcctttaaaggaggtttattgaatgaaagctgtcacgtaccagggaatgaatcatgtggaagtatcgactataaaagcaccggaaatccaagatccagaagacgtcattgtccgcattacgtcaacagcgatttgcggctcggatttgcatttgtaccaaggcaatatgtatacgccaaaagggtttgttatcgggcacgaaccaatgggcatcgttgaagaaacagggccagaagtaacgaaagtcaaaaagggagaccgagtggtgatcccctttacagtcgcatgcggacattgttcttattgccaaaaccaccaagaaagccagtgcgaccgctcaaatcctcattatgattccggaggtttatttggctactcggaaaaattcggcgattatccaggcggacaagcagaatatttgcgtgtcccttttggcaattacacgccatttcgtttgccagacgattgcgaattagaggacgagcaagtgttgtttttatctgatgttctcccaactgcatattggagcgtcgtgcatgcaggcgtaaagaaaggcgatacagtcattgtgcttggctgcggcccagtcggcttgatgacgcaagcatttgcctggcaacaaggggcagaacgggtcattgctgtcgattattttgattatcggctcgaaaaggcacggcaaatgaatcacacggaaacatttgattttacaaaagacaaagacataggcgaaacattaaaagaattgacaaaaggcggcgcagacgtcgtcattgattgcgttggcatggacggaaaaaagtctccattagaaatggtggaacaaaaattgaaattacaaggcgggacattagggccaatccaaatcgctactaaggccgtcaaaaaatgcggcatcgtccaattgactggcgtgtacggtggcaattataacctctttcctttaggcgcattttttagccgcaatgtcactttaaaaatgggacaggcgcctgcacgcgcctatatggagacgctgtatgaacaaatcagcaaagggttgattaatccaacaagcattatcacccataaacttgctctaagtgatgcgccaaaagggtacgatctatttaataataagaaagatggctgcatcaaagtggttttgaagccttaaccaatcaatcagtcaaatggtgttgccgataactgctaggatagcataggccctcctagcggttgttttttgtccaaaacacttgttatcaacaagcaacaatatttaacaaaaagaacaagaaacttgaaaaacaatgaaactagcaattgacattgatattgattctcattatcataataattgaatggtaaatgatattgattctcattatctttaaggtgtgaatgaaatgaataaaaaagcatgtgcttttgcggtttttctattgcttgcaggttgccaaggggccagttcagaaacagagaacaaagagcctagtaaggaaggggcttattctgtcaccgacttcgcagagcgaacggtttcctttgaacacccccctgagcgaatcgctgtattaggaaatggtgagctagatattgtttatgccttagggaaggaggttgttggaaggccgacgagcgcagaacctgctattgtagcggaagcagaagaggccgcgcaagtagggtcgtcccatgaaattgacatggaacgtttaacgtttgccaatcctgatctagtacttggtagtttcccgatgaatgagaaggatgtccctgctatagaaggaatgggcgccgatgttctccttactagcgccaattctgtcagcgaaattgaacaacaaatcgagttgatcggtcaagcattgcaagagcaggaagaagcagagaaacagatcgcgacaattaaagaaaaaaagcaagagctttctgccaaccctttacataaaaaagataaagtactgcttgtttatggagcgcctggttccaatttagcagcgcttccaaattcgctggccggtgacattctcgacattgcaggcggagaaaacgtagcggcgtcttttgaacagttagatgattttccacaatatgcggcgctttcgccagaacggattatggaagcaaatccagatcggatcttatttatggcccatggtgatcctgccaacgtccaggatggttttatcaaggaaatggagcaacatgctggctggtcgcagttgccagctgttaaagaagggaagcttgagattttgcctgctaatttgtttggcaccaatcctggcacaaacataacggaagcgcttgattatatgcgtgcgttactagaagaagacggtgcagaacagtgagcgagctagtgcttgctaaacgggctagaagaagaaaaggacttttgatctctttgccattggttttgctcgtttcgatggccggtgggcttatgctaggagctgtgccattttcgttaggagacattggtgcggttttaatgggagaaggcacggaaacaacccgagcggtgattgcgaatattaggttgccgcgtattatagtcgccgcacttgcaggggcatgcttagcggcctctggcgcgatattgcaaggtttaatgaaaaatccattagccgatccaagcatcattggcgtgacagcgggaggagggcttgctgcaagcatcgccatggtcgcattgccacagctaggctatttgcttcctggctttgcttttatcggtgcgcttttagcaacgggaacgatttatgtacttgcctgggaaaaaggcacttctcctttgaagcttattttagctggaattgcagtgaatgccttttttggagcaattcaaagcggaatttttattttatttagtgatagggtccagtcgattcttccttggttagcaggaggatttcaaggaagaggttggtttcatgttgaatttgtcctgccttatgcattaatagggctgttgttatcgatttttgcaattagaccaatcaatttgttgctgttaggtgatgacacggcacgattgcttggcgcgccagtcgaacggtttcgcttgtggcttattttgcttgccgcttttttagcaggagcggcagtgagcgtcgctggtttgctcagttttgtcggccttgtcgttccccatatggtccgtctttttatcggcagtgattaccgctatttgctgccattttcgattattggcggagcagcccttgttgttttaacagacactgtggccagaacagtgtttgatccaatcgagcttccagtcggcattttgctcgcttgtctcggagcgccgtttttcctggttttgcttaagtacaacaaaataacgcattagcgcgcgtcgttttagtaaaggaggtgagcatacgtgtaagcagaacggcagcgacaatgtgaaaaaagaggaggaaataaaatggtgattgtggcaaacaaaacgttgattcgtaaaggggaaggccataaactcgttaagcgttttgacaagattggcaaaattgaaatgcaaaaagggtttcttggccttgaagtccttgttaacgcaaaggaaaaagaggtcgatgaagtaacaattagcacccgttgggaaacgaaagccgattttcatgcgtggacgaaaagcgaagctttccgtgaagcacattcaggccgaaacgctcgcccagattatatcttaggcaatgaaatcgaattttacgatgttgaagtagttcgcatgccgattgcacaagcacaataataaaggggtcttttaccaagcagtacaacgactaagggaggagaacaatgggtattcgactaagaaatatgatgtttctgctaagtatggtcgcgctgttcgtgctcggagctaattctgactacgccagtgccgagctagcagacgggacctatacgattgattatacggtcatgcatgcaactgatccttcggcttccattgccaatgactactgggagaagccagcaacattgcatgttaaaaacggtgagatcacagcagaaatgaaactaaaccatagttcatggattgttgcattccaaacgccaacaaatggcggttttgcagatgtagctgtcgtttcggaagatgaaggggccgatacaagagttgtgcaatttccccttgaaggaattgacgacatgaccgaagcaaaaatccatgtgatcgttcctgatattgattatgaccatcattacacgattcgctttgattttaatgaaaatagtttaactgctttggaaacggctgcatcaagcgaagaagacaaaaaccaagaagataaaaaagacgatgagccgctgggaacggcccaatcgtctgaagacgaaggcaaacgcacacacacagacacaagcaaaccaacggaggaggacaatccgcaaacaaacgatgccgcacccattgctttgcttagcagccttgccatcgtcagtgctattgtactccttcgcaaacgtctaagacaagtttcgtgaaggaggagaggtaaacatgaatgtgcgaaaccgtttgattaatggatttctttctctcttgcttgtattcgctaccgtgctgccgacatttgcaaacacagcttcggcagccagcgagccattgcaaaacggtacttatgaaatcccttttaaagtgcttaaaaatggaactgatgagacgtcggtcatggatggttatacaaaaaagccagccacgctttatgtaaaagacggcagctatgaaattgatatgacgcttacgaatagcaactggtaccaagactttaaggtcgaaggcgcacagccagaaacgatttccgaggatacgggcaaaaatgaacgcgtcgtccgttttcccgtttcccaattagatgaaaaacttgatgcctatgtccacatcattgttactggcatccctggattcgaatacgacaataaatatgatgtgcaaattgtttttgacataaatggaatctccataattgaattagacgagcctccaactgtcgaagaaccaggcaccgaagagccaggcaccgaagagccaggcaccgaagaaccaggcaccgaagagccaggcaccgaagagccaggcactgaggaaccaggcacagaggagccaggtactgaagaaccgggaacggaggaaccagtcgtactggaagatggcgagtatacgattccattcgcagctaagcatgcaacagaagaccgcgattcgacgatgagccgttatttagtaaatccagctcagttgagcgtgaaagacggtgttcaaacggttgccttaacagtgaaagacagccatcaaattacagcgctccaacttgaagagaatggcacgttttacgatggcgaggttgtcaaagaagacggagaggccaatacccgtacgtatgcatatacggtaacagatttggacaagccagcaaacgcaaacgtgtcgatgcgcgtttcaatgccaaacggagacgtatatgaaaatacacaaagtttccgtctgttgtttgatgttgaaggaattgaagcgttgcctgcacctgaagaaccaggcaccgaagaaccaggtattgaggaaccaggagcagaggagccagcaacagaagagccaggcaccgacggaccaggaactgaagagccaggaactgaggaaccgggagcagaagaaccaggaactgaagagccaggaacagaagagccaagtgccgaggaaccagggactgaaaagccaggaacaggcaactctggaacagcccctagcggaaaaatagacaatctcgccaatggacgttatgaaattgactttacctttttgaaagatggcacagaggacgtctcggttatggatggctacacggaaaaaccagcgactttgtacgtggaggatggcgagtttactgttgatttaacgttgcttcacagcagttggtatgaggatcttaagattgcaggggaacggcctgaggttgttttaacggacgtagaggctgataaacgtgttgtccgtttccctgttagtaaccttaacgaaaaaacgaacgcttgggtgcacattgtcgtcaaagacattccaggatttgagtatgacaatgagtacaacacacaactggcatttgacgtcgattcgattaagttgattgagaaggatccggatcctgagttgccaggaagcccagatcctggagagggacaaaatggaaataacggtggaaatactggcaatcatggaggaaacaatcacaacggcggaaacagcagaaatcctggcggcaatggcggaaatggaggaaacaatggaaacgaaccgcctgttgacgttaaccagttagaagatggtcgttacgaagtggatttcgctgtttacaaagacggcactgaagacatttcagtgatggatggctatacggagaagccggcgaccgtttatgtgaaagacggcgagtataccgttgatctcacattgacacatagcgactggtataacgatttaaagattgaaggcgagcgccctgaagtggtttctgaagatgaagcagctaggaaacgcgtagtccgttttgaaacagactcattagaaacacgcgtcaacgcatgggtgcatgtcattgttcctgatattggttatgacaataaatacgatgtgcaaattgcgtttgacacagctagccttaacctgattgaaaaaggggaaacaccccctccagcgacagagccaacaaaaaaaggcaataacggcaatgataacaatacgggcaatgttggtcaaaacggcaaagggccgaatggggaaaaccttgattataagcggggccaactaaaagatgagaatgggctaaagcaattaagcggtgatcatgttgccaatgccaaaacgggcgatatggcgatgattggtttgtatgcggccttgctcgtcgcatcaagtatctattttatttggaaacgccgcaacaagcggttttcagccaattaatgaaaagccctggccgcttgtttggccagggcttttaaaaaggagcttgtttgcaatgaaactgagaacacctgttggtatagcggcagcagccgtgatgcttgcatcgtgtcagccagcaagtgaaggggctactgggaaaaaagcagaggagggagtcgaaccattagacgagcagccagctcggatcgtggcgacgactgtctctgcaacagaattagccgacgctcttaacttggagcttgtcggcattccgactagctataaagagctgcctgtacgttatgagaacgtcacggaaattggcaaccctatgagcccagacatggaacaaattcgcagtttggacgctgatgtcgtttggagtgtgacaacgctagaggctgacttggaagagccgtttgctcaagctggtattgacgctaagtttttgaactttcaaagcgtggaagcgatgagtgaagaaatcttggaaatgggcgaggcctatcaacgagaagaacaagccaatcgtctcgtcgctcgttttaatgaacggattagcgagctgcaaaaacagacaaaggacgcggattcgccgtccgtattgattttaatgggcgtgccaggaagttatttggtcgcgactgagcattcttacattggcgaccttgtccgtcttgcaggcggggaaaatattgttcaaggagaagaggaggctgagtatttagcgtccaatacggaatatttgcaacaggccaatccagatgtgattttgcgagctgcccatgggatgccagaggaagtcgttgaaatgtttgatgaggaatttaaaaccaatgacatttggaaacattttaacgctgtcaaaaatgggcgcgtttatgatttagaagagctgttgtttgggacgactggcaatatcgctgtagttgaagcgttagatgaactagaagcgatgctctatccagaggcgggcgattaaatgaaaaagacggttgtgtttattagtcttgctggattgctactaggcttgttgtactggtcggtgatgagcggcagcattcgtgtgcccttttcacagcttgtgcacggggttattagcaaagcagatgaagaagtcaatgtcatttatgatctccgctttccgcgtatcattatcgccagttttgccggtgctgctttagcggttgctggcgcgttgttgcaagctgtcatgcgcaacccgattgccgacccgagtattatcggcatttcgtcaggagctaattttacggcgttgttagcggttacgatcttcccgcaactgttttattatatgccactgtttgcctttcttggcggcatggtcgcctgtggcctcgtttactcattatcttggaaagacggtttacatcctttaaagctcgtattgattggcgtggctatccacgcaacgtttagcggtcttgccgaagcatttaattacagaggcagctattcggtgacaagcatatcagcagccacgacgtcgacattgtcgatgaaaacatgggcagacgccaacgttatgctgttttatggcggggtggcgattgtgctctccctttgcctgtattcgatatgcaatttattagttttaaatgatcgcacagcaagcagcctcggcatgcgtgtcattcctgcaaggcttcttgtttcgtttgcagcggtggtgcttgcgtcgacggcgacggcgattgctggtgtgattgcctttttagggctgcttgtgccccatattggtcggcagttggttgggtctgattataaaatgctgttgccattttgcgcattggctggcgcaagtcttttgctcgcagctgacacgattgggcgccttctccttgcaccgaatgagattcctgcatcgattctcatgtcgatcattggcggcccattcctgattttcttgttgagaaagagggagcaaatgaatggacattcgtaatttatcgttttcttatcgtcatcatgaaaagacaatcaatcacattaatgccgcgatccgcccaggggctattactacaatcattggcccaaatggctctggaaagtcgacattgctctccttgctagcaaatcgcttgactcctataaaaggcgaagtcgtggtagacggcaagacgctttcttcttaccgggcgaaagaattggctcgacatttggcggttgtctaccagcaaaatgaagcaccggctgacattacagtcaaaaaattagtcgcgtatgggcgctttccttatcggaaacgattttccaactggaaagaagaggacgagcttgcggtaaatgaagcgcttgaagcgactaaattagaaaacaaggcccatttgccgttgttgtctctttctggaggcgagcaacagcgagcttggattgcgttagcgcttgcacaaaaaacaaacatcctgcttttagacgaaccgactacgtaccttgatttgtaccatcagttagaagtattggaacttgtgcgctcactaaatcggttaaaaaagacaacaattgtgatggtgctccatgatttaaaccaagccattcaatacagcgatgagctcatcgttatgcaggcaggaagcattgtcaaagctggcttgccaagagaagtggtgacggaagaaatggtagaaaacatttatggcgttcgtgctgttttgcgcgatgacgcggaagcgggcctcgtattgttgccagttggtatttagaaaggggggaggggattgaaacaagccattagcaaagtcatatctttcttgttcgcatgcgtgtttgtttatgcttgcgccaatttgattcaaatcggttatgattactggaacaatcgtacagtattggcggaagcccaacagctgtacgaaaggagcaatcgcccaaccgctagacaaggcaaagagggcactgccttacaggatttgcagcaatcggctttttcaggtttgcacgcgatcaacgatgacatagtcggctggatttttattggcgggaccaatattgattatccagtcttgcaagggcacgataatgaatattacttaaaccgcaactataaaggcgaggaaacacgagcaggcagtatttttatggattaccgcaatcacattgggggagaggagcgaaaccggatcttatacgggcatcgcatgaaagattcgtctatgttcagcgaccttactgcctttacggaccagtcttttttttataaccagccagacatgttttatgacacaacagacgcgcagtatgatattgaagtcttttctgtttaccaaacgaaaacagatttttattatatagaaaccgattttcaatcagatgatgcgtacgaagcttttttaaccgatattcaagaacgctcgctttttcaagctgaaacagaggtaactgtaaacgatcaaattattaccctttccacatgcgattatcgccttcacccaacagaaggaaggctcgttgtccatggcaaattgattgaacgcagcagcggttgatcggggacaaaaacttagaaatgaatttaaataaagagacgggcgctggcaaaaatgctggcgtttttttacaggtagtgatgtctaatgtaaataaccgctttaagacaatgaggagcaattgcgacatttttacacggtttattaatcgtatcttaacatatattcnnnnnnnnnnnnnnnnnnnnnnnnnnnnnnnnnnnnnnnnnnnnnnnnnnnnnnnnnnnnnnnnnnnnnnnnnnnnnnnnnnnnnnnnnnnnnnnnnnnngtttattaatcgtatcttaacatatattcgttataataatatattaagtataaaatggagcggcctcgtgccttgtttgccactaagcagaaacatgcagacaaaacagctacatttcattcgcctttggtcaattacccatgttttctaatgaaattgagccaattgtaaatactaccgagaaaggtggcttgaaagaaggcgatgtgatgatgaaaaggctaaacgaagctgtaatgcgtataaatgtcattaaatgaacgtcaatccacgaatcaattgcggaggtgaatcccttatataagggaattgattggacataggcataatgattaatttgatcggcgtagcggttttaattgcgctcactgcgtttttcgttgcgtctgaatttgcgattgtaaaaatacgaagtacacaacttgaaccccatattgagggcggcagcaaacgcgcgttagcagcgaaaaaagttgttacccacttggacgagtatttatctgcctgccaattaggaatcacgattacggccctcgggatcggtcgtttggcagagccgacatttgagcggttgctccatcctgtcattggctcctttgcgattagcgatgcgttagtaacgacgatttcgtttcttatctcttttctatttgcaacgtttttgcatgttgtcattggtgaacttgctccgaagacgattgcgattcaacgagcagaacaggtgacgctatggatcgcccggccgctcatctggttctatctcttgctctacccatttatatggcttttgaacggttctgcccgtctgatcgtgaaagcttttggattccagccaatgagtgaacatgaagtaacgcatagtgaagaagagctgcgcttgatcttgtcagaaagctacaaaggcggggagattaaccaagcagaatacaattatgtgaacaaaatttttgagtttgatgagcggattgccaaagaaattatggttccgcggacggaaatggccacactgacgattgacgacgatatggatgaaattcttgcgaaaatccgcgaccaaaaatatacccgctatcccgtcacagatggagataaggaccatgtcctcgggattgtcaatgtgcgagagctgttaggaaagctggcgtatgaaccagaccatcccttagatttaagggaaattatgcgtcctgccattacaatcattgagtccgttcctatccgcgacattcttgtggaaatgcagaaaaatcagagccacatggcgatcctttttgatgaatacggtggcacggctggtttggtcacaatggaggacatcattgaagaaatcgtcggcgaaatcaatgatgaatttgatattgaagaagaaccgcatattcaaaaaattgccgagcaccactaccggattagcgggcagacactcattggcgaattgaatgagttgctccatattgatatggacgatgaagacgcagacacaattggcggctggatgctcacgcaaaaatacgatcttcaagaagaagaaacgctcacctatggcaagtatacgtttaaagtcaattcgtttgaaggctaccaaatcaacacggttgatgtgtttttaacgcctaaggaagcgatggaagtcgaatagcaaaaaccccttctcttttaaaagagaaggggtttttcacgtttaaccttccagccatgcgtgaactagatcctcgtgtttttcgatccattccgctacggccccgtcaatatcatcctcatactgttgttgcagcgtaagaagttcagacagcgtttcctctgtaaaatggcaattatttagccattgaataagatctggctcgtcttctgccaaaccattgcgagccatatagtaaatatcatcttcctcgccataaacatgatctgggtcatccagaaactttaaatcgtaagatccaaatgtccaatgagggctccaaagagtgacgacaatcggttcctcgtttttgtaacgggcatctagctcggcaatcatggcttgttcagaagaggattgtaaagtaaactcttccaagccgtaatggtcgatgacttcgtcttgcgtcaattgcattaacgccgagcctggatcaatccctgtgattgttccctttagctcgtcgaaatagccagctaagtccccaattgtttccacattatccatatacgaagggacagccagccctaaggttgtcccttcgtacaggacgccatcagcctgtacgtctatttcttctgaatcgagtgagacatatgcttggtcagtgaaagggagccaagtattaaagccgatatcgatatcgccgttttcgactccattaaaaagcattgctttctctacaagagaaagttccacttgataaccttggtcctctaaaagcgttttccataaatgggcaaaagcaattgactcggcgtaattgttgtggccaattgtaatcgtttgttcattgctggcacagccgccaagtgtcaaagcggccaaaagaattcccgttatgcttgttattttgttcacaacattcctcctgaaataaaataaggtacaggcttagtatacaaaaaggcgcgaaaaattgcttacgaacgtgagtccgcctcagcctgttgtttgacttcttccacaaacgatcggtatccctcttggtttcctgtggtgttcgctattttttccaagctgtcaagaaaatggcttctcgtataattgaacgtgaaaggagcgcgatagccttttgcgaccataagagcgaattcccaagaaatttgataataagaagagtcgattgactcgacaagaaggcaaacggcttcaaggacatcattggtgatgacaggatcgtcttgggcataaatggtgatgtgggagaaggtggagtacaggtaaaattcaaatgtttcttttttaattatgacgcgcaggtcatttttttgatcagtcaagtaaggcgtaaaacgggttacttttgaaatcgacaaaagcaaatccgtcaactggaaaatggcatttgaagctgtatcaggatcgtcattgccaatcgacttaatcgcaatttcttttagcttgttaatgccaaattcaaggtcttgaacttctgttttttttgcgccaatgtatacccattgccgtagcttttccacgtttgcatggttgcttcccctctcccaataagtcatcaaaggcgttccttccaagacaaattcgccgatccgtctttcaaatcgaatgatgagatcgtttttttgtgcataccgtacgaggtttttgtaattgacaatttgaatgtagcctgacttggctgcacaaacagtaatcgcctccttgttgcaaagatcattcggagatccattcggttcccgtgtcctgtaaggctccaaatcttttccaagtgtctctagtatttggtttttcgattcgcatttcatattgaacataatattcgagacttgcatccatttaacagagtggttaatgaaataaataaaggcagcaacagcactcaacataaacagaaccgtcatcgtcggaatcgcaaagtaataattggtcacttgctgatcaagcagaaaaaacgaaaaaagaataaacacaaacaccaaattaaaaatccccattacatgttgggtgcgcttatcagaaataaacgttgtcagcatccgcggtgtaaactgcccagaaaaattcgtcaggacaactaaaatcgagtttaatgtaaatgcatttagcgtaatgattccagctacgagtgagctgacgatttgccgcgtcaattcatagtctgcctgaaaaaagtggggaaccgctccacctaaagacagctccatgtcaagccaataagcaattgcaactaagcagacgcctacgattgcatacaacaagcaaatgacccaaacatttgcttttatctcgtagcgaaattgacgtatggacaaatttttgaatttttttagcatgcgcggaaaaaggtgcagaaaatgcatttgttttttcctttcatctagttgattatagcaagacaatgtcctttacccctgttcgccccatatcaaactagcgagaaggcgcttcatggagtcaagaggcagaaaaggacaacaaacaaaacgccttgaaaaggcaaaggcgttttgtttgtcaaccgtgtttttgttataacccagcttcatattgcagtcgcttggagagctctctaaactgttcttcatcaaaaccaggtgcgtattcttcaggcacagggtctaaatcaggaatcttaccgccttctggtgtcccatcgacgacttctaattcacctggagggccaatcggtgtcggaccagaccaaatgcggttaagcaattgataatcatcatcgctgaaacgataaagcttacggtgcacgcccgttgcttcgtatttatgggcgtggtcgaatttgctattatccaagtctgggacaggcagcaatttcgtcatgttgacgcctgtgacttcttcgagcgcccgtgcataagcaaccgcgtggacacttcctcgtacgagcaaataaccgattaactcccgtgcggtttcattctccgtcatttgataaacacgcattttatgggtgcgggcgccgcattccaaataaaaattgtggaggaggtcattgactaagttgccactcgaaaatacattgtcgcctgtccatggtttgccgcttgaatctgttggcagcgcattttgaccgccaagcaaaaagttaaatttgttgccgatgccttgaacttctttaagcggggcatggtcgggattggtgctgccattgccaacagacccgtccaaacagaggttaattgtattggcgacaagctctacatggccaaattcttctgctgtaatgctcgcaatcaactcataaaaagggcgaagcttttttttgctgcggaaattaaacgattggaacatatagttgttcagcgtcgacatttcgccaaagcggccgcctaacaattcttgcaccacgccagctgattctggatcaggttcatttagttcaggcaaatcaatttgcagtttatcaatacgcttaaacaatgatatccctcccggcgaatatggtagtgttcttggactacctacccggtacagaaaattttaaacagaaatggctctttggaaatgacaaaaaaaagcgtccggcaatgcgtattgccagacgcgggagcccctaagtcactgcacatacttcccataatcaggaacagcgatgcgttcaaattgctggtcaaggccagcgaggccgtcgcgaagctcttggccgaaaagaggcaatccatggccaggaacgaggacggctggatctaatgaccggagcttttggacggagcgatgtgccgctgtccaatcggtggtccagtagcggggcggaccttgaatttgttgattttgggtgatgacgtcaaataactcgtcttgcttcacagtaataatcgcatctgctgatagcaaagctttgtcccgctcacggaaaaaggcaacttgaccaggggaatgtccaggtacgtgtagccatgtccattcattctcaagtcctgcgaaatcaagtttgtctgggagtggcttaacatagtcgtcaagctggatcggttcatttggaaagaagcgggatagcttggctactaaccctccttcgacagtggcatccggtttcggataagctttttcgcctgttacataaggcagctcgtcgggatgaatgtagatagggacatcccaattttgtgctaaatcaaaagcgccgcctacgtggtcaaaatggccatgtgttaatagaatcgctgatggcgggttgctttcgccaaattgcttgatgagcgcctctgtaatcatgtcgctttttccaggcatgcctgtatcaattaacacccagccatgtgcttttgtagggtcgccgataaaacaaacattgacaatttgtgttgttaaacaaaaaagtttttccgtcactttttgcataagcccgctcgttgccgaagtcatcggcagtttgatcgaattcggggcagtatgattccagtcaacgatatccattgctttccctccacaattgtgatgcctctagtgtgtacaagaaaacaaaaaccatgtatcagactggaggtaaacccagcgtatctagtcatagtctgcccaccaaaaatcgttgctcacttggatgtgccccatcactcctcgtttgttgagtgatggggcacattcattacaatttaaaaatcgttttaatgttgccgtcttctttttggtcaaatatccgataagcgtctggggcatcttcaatccccattcgatgcgtaatgatatcagttgggtcaatcgttcctctttcaatcatggtgtaaagggtgggcattaaatggacaacaggggcttgccccatttttaaagaaacattgcgtgtgaaaaaatcattaattgggaattgattggcttcggagccgtatacgccggtaatttgcaccgtcccgaatttccgtacagcttcgctggcagttacaattggctggattgtcccgaattggttgtccccgctagagccaaatgtttctcctggtggaacggtgccatccatgcctacgcaatcaatgacaacgtctgcgccgccctctgtgtcttcatagagctgtttgcctatgtcaggcgtattgctgaagttataggtttccactaagttggtccgttttccatgttcaaggcggtgtgcgacttggtcaacagcaataacacgtttggcgccatgaagccaagcaaatttttgtgccattaagccaatcggcccacaacctaaaataataaccgtatcgcctgtcgaaaccccagcatgtttgacgctccaataagcagtagggatcacatccgataataaaacaacttgctcgtcatccaattcactctcggccggtagcttaaatgacgtaaaatcgccataaggcacgcgcaaatactcggcttgcccgcctggataatttccaaactgctcagcaaaaccaaataaaccgcctgcatccgaatgagggtttccgttagagttgtcgcactggctttccatttggtgttggcaaaagaaacattctccgcagctgacgttaaaaggaatgacgacgcggtcgcccttttttaacgacttgaccattggcccgacttcctcgacgatgcccatcggttcatggcccactacataatcggtttcaggcacgatgccgccgtgatacaaatgcaaatccgatccgcaaataccacttgcggtaatttttactataatgtctgtgtcttgttgaagggaaggtgcaggtacttcctttggttccatctgctttttgccttgaaaggtaactgctttcatctgtgaatgcccctccttgtttagtatgtaaggggctattccttctctaacggagattaaaacttccttggacaatctaataataaaagcgccgctgcaacacgatgcagcggcgcttttatgagagggttacgattttccttttcgcatgttgagcatttgaaaaataaaaacgactaaagcaacaattagcaacaggttaatgagacctccgccaatgtcagcaatcaagcctagcagccacaatactaaaataatgataataatggtccacagcatctttttcactcccatttttaacgtgtttcgtttttttaatctttccctaatcggtcattgttaaacatcgaaagggcggtgtggaacgaagaggctatggtatagtgaaaatagttatgagtaaaggagtggcacaaatgggaggactagcaggaaaacatgtggccttaactgcttcgcggaaaacggaagaaatggaggcgcttttacataagcagggggcaacgagtgccgtccgttcgttgcaaggcacggtcattcaagatcaagaaaccgtgacagaagcgataatctcagggcttgctacacagcccgattggtttatttttacgactggcatcggtgtccagacgctgctcgcttttgcagaggaagcaggggtaaaagaggcatttataaagcaagttcgttctgctcgcattgctgtgcgaggctacaaagcgaaaaacgcgttgttgaaagaaaatatacctatggatgtcgtgtcagaggatgggacgaccgcacaattagttgagcaattaaaggaaatcaactggaacggccaaaaagttattgttcagcagtacggtctgccttcgccaacgttggaacagtttttaaaagagggaaaggcgatggtgtccgcatggcttccctatatccactatgctccgaaaggagaaacgattgacttgtttttagaggagttgctcgagaaaaaagaatacgatgccgtctgctttacaacggcattacaagcaaaggcgctatttgccagagccagtgaaacaggaaggcacgagcagcttttgcatatgtttgctggaccgacagttgcatgcgccgttggcaaagtcacagccgaagctctgtcagaagaaggggtcaggcgtgtaatttatcctaaaaaagaacggatgggcgcgatgatcattgaactaggcaagtttttagaagcgtgatggttgtgtatatgttaaagggggaggactatgtacggggatattaaagccagcattgctgctgcttataacgaacatgtacaagaacgtgaaaaagccgttatggctggctggaaaatacaagaacgagaacgttttatgcagcaattagcgagcgaacataaacaggcattgcttgatattggctctggtcccggacacgatgggctgtttttccaaacgcatggaatggacgttttttgcgcagatctgtctgaagcctctgttcgtctttgcaaagcgaaagggcttaaagctgaagcgatgagctttgagcagcttaagtttgctgactgttgctttgacgccgtttgggcgatgaattgtttgctccatgttccaaagcaagaattgcccgcaattttgctggaagtaaagcgtgtgatgaaaaaggatgcgttgttttatgtaggtgtttacggtggtgaagactttgaaggtgtttgggaagaggaccattatcagccaaagcggtttttttctttttatgaagctcaagcgctaaaaaagatacttgcacgctttttttctgtagcaagcttctcggtagtcacgcctgagatcattggcggaaagctagaatttcaagcgttcgtgcttcgtaaataataaaggatagcaggaatatgaaaaaattacggttttgatcagctgttcatggctggtctttttttggggtaaaaaacaggtttacaaaaacaggtgcttattgtatagttgattacacgactaatcaacccatcaacaataggaggaacgagaatgtgaagtccgtttttgatgattcgaagccgatttttcagcaaatatcagaaatgattgccgacgatattgttgacggccaactgcaagagggagatcaacttccttcaacgacggccctttctcaattttatcgcatcaaccgggcgactgcgcaaaaaggattggcggcgttagtggacggaggatatgtatataaacaacgtggagttggcatgttcgtcgcagaaggagcacgcgacaaacttctagctgagcgtaagcttgactttcaccaacagtacgtgcgcccgatgctggaggaagcaaggcgaatccatttaccaaaaaaagagatcatacgcttgattgaggaggattatgatgattgaaatgaacaatgtacacttttcctatggggagaccaaggcgctacagaatgtaacaatcaacgagaaagagccgatgattattgggctttggggccgcaatggcgccgggaaaacaacattaatgaagcttctggcgggattagaaaagccagagagcggcacggtgcttgtcaacggaattgcgccttacaattatagtggatcaatgaggcatgtggcctatatgcatgaaaaccatccgttttcagaattatggaatgtcagcgatgctttacgattcgcttcgtatttttatcaaaactgggacggggaattagcgaatgaactagttgatttatttgaactgccacgccacaaaaaaatccgcaagttttcaaaagggatgcagacgttgacgaaaattgtcatcggcttggcctcaaaaacccctgtcacaattatggatgaaccaacgaatgggctagatgctgacatgcgaaagcttttctatgaagttctgttagaaacgtatgaagaccatccacggatgtttctgttatctacccaccatatcgatgaattaaagcctttgtgcgaaaaaatcgcgattgtcgatcagaaaacggtcattcgttatgaagaaaccgaaatgttaacggtgcaaggcattttgttgactggggagagagcggccattgaggaactaacagcaggatataacattttagaggaacgcactcttggaaatgtcgtgaatgtcatgcttgatgattccttttctgaaacatgggcagagcgggcaaaagcagctcatgtgaatattgaaaaggcatcgcttcaagattatcttgtttctttaacaaaaaatcaaaagaaggaagtgcagcaatgaacgcattgaaaggtccttttcgtttaatgtttgaagacatgcgaatgcagttttatattttgacgggtataactgttgcattgtggttgttttttctggtgttaggaatgagtgtagacacatttatgggcacgttgtttggcccttattatggcttgtttgcgatttatccgtttttagtttacaacaaaggctatgtttacacgcttgcactcggggggacaagaaagcagtttttgtttagtatgctagctgcctctggcttgtttattgtcatttgcatggctgtgttaaatggtatttaccaactaaatgcgtttttgcttaaccaaggaataatcaatatccccctctttcatatgggcgaattagttggttctgccaatccgttgctttatttctgggttgatctcctttggtgtgtgtttctgtttggcgttagctttggtataaactctgtctggttttattttggaacggtgcgttttttgttaggcttaactggagttgcactagttgtcattacctatttggcgtttgctgaccttcgcacgttgtttacttggattgttgaaaaccatcttgtctttttacatgttattggcgcaattggcttcgcagctgccgctctttcctatgtgattatgaaaaatggcccactagaacgaggcggtgaaagaagcttcttctttaaaaacaaaaccgttcaagactaacgagctcgtatagtgcaaaacataaaatccaaagcgatttggcgagtgcctgctttggattttatgttctcaacatgacagcgaacaggctttatgttcgtaaaaaaaatgaaacctattctcttgtggttgcgtaaagttaatggatgtcaagcaggttagcggcacagttgcacaattcacggagctccttaacggtagccattgttgccaacatgccttgaaaaatgattttcttaggctcttttttatccaattcagcctgcaatacagatagggcgtcgaggacttcttgctttttttcctctgagatgtgcaaagtcggcaatcgttttcgaatcgctgaaagtgtttgcttaacttgctccttggtgctgcctgaacagggccagtctaactgttgaagactctgttcggagacgaacggctcttcgcccccagcaaccagcccttctgccaagttatcgagcctccttagcaaataagttgctgcctttttagggctaaggggatgttttgtaagaagcagaagcttgaaaagcgaatgactcagtccttcaaacagcaggattaggtcaggaatatagcgctccgcttcctgtccgtagatcgataacaatgaccgcttttgccaattgtagtgctcgagctttttctcgtacacaaactgtcgcacctcgtggctaatgggcagcacttgttcttgaaaatgcatgataataaactctttatgcttcgaaacctcggcaaacaaaaattcaatttgtgtttgaaatgcccgccttggcgttaactttttttgttcaatccggtccaataaagtcgacatcttttcgtaatagtagcggtaaatgtcgataagcagcttgtcttttgactcaaaatgcaaataaaaagcaccttttgatataccagcctcagatgcgatttcttgaatagacgtcgaaaagtagcccttttcggcaaataagtgaatcgccgtttcgataatcgttgtttttttctcgttcattcctattcccatcctctcggagttgccattatcgtaacagattagatggccacaaagcaatcaaaaatgaccgctcagtcataaaaggggaattcaagctgtggttctgtaaatttttttgtgtaaaattgttggcacagttgtattttgacgtttaatcaactaagattaagtgtataaaattgaccggtcagtcatgaggcgactgcaacatttaggagggggaacatgaaacgaaaatatacattgcttatcggcggcctctggacgaatcaagccactacatatgttcgagaaataacgagaacaccaccctattctttagaagaaattgtttcacgtctaaaatcaatcggtgtcgacgcatccgtttgtgaaaggccgttatagaataagggagtgcaattagagagaaggggagaatacgctacatgaaatcgattattcagttttcgatgagtaataagtttgccgtctggctgttgacagttatgctcactgtcttcggtttgtatgcagggatgacaatgaacagggaagtgatcccagacattgatgcaccagttgttacggtatcaggcgcttatcctggcgctacgccagaagaagttgccaatgaggtatccatcccgattgaacaagcggtagaaaatttggacggcgtatcggccgtgaactcgtcttcttttgaaaacttcgcttcgattcaaattgagtatgaatttagcaaggaaatggatgaggctgaagcagaggcaaaagaggcgattgagcaacttgaatttgcagatggggttgaagaaccaactgtatcccgtatcaactttggtgcttttcctattttaacattgagcgtttctgaagaaggcgcatcgttgacggagctaactgagcgtgttgagcaggacatcattcctgagctagagggtttacctggaattgaatctgtaaccgctgcaggccaagaaacaaaagaagtgcagattacttttgatgaagaggcacttgccgaacatggcctagatgaagaaaccgttacacaattgttggaagcatcatcgatgcgattcccgttggggctttatacattttcaggtgaagaacagtccgttgtcatcgacggcaaggtgactacacttgatgacttgcggaatttgcagcttccgtccatccctgctggtggtggggcgccagaaatggggcaattgcctgaaggcggcatgcctgaaggtgaaatgccacaaatgccagagggcgaaatgcctgacggaagcgggccgattgaagggcaacaaggcatggaaggcggagaactgactggagaaatgcctgagcttgcgcttgaaacgattgcgcttgaagatgtagctgacattgaagttgtcaatgagtcgaattcgatttcaagaacgaacggccaaacggccattgggatcgaaattgttaaagctggagatgccaacacagtcgcagtagcggacgaagtaaaagaagcgattgcttcttttgaagaagacggattgtcactatcgattacaacagaccaagcggaaccgattgaagaatccgttgcaacgatggtaaacaaagcgttgtttggcgcgctgtttgcagtcgctatcattctgttgtttttgcggaatatccgtacgacagtcatttccgttatttccattccagtttcgctatttattgctttaattgtgcttcagcagttggacattactttgaatatcatgactcttggtgcgatgaccgttgccattggtcgggttattgatgactccattgttgttgttgaaaatatttttaggcgtatgggatcaaaagaagaaaaactgtctggccgtgcattaatccaagatgcaacgaaagaagtgtttaagccaattctgtcctccacgattgtcacagcggttgtgttcctgccgctcgggcttgtcgaaggaatggttggagagttgttccttccgtttggcttaacggttattttcgctttatttgcctctttgcttgttgctattacagttgtgccgatgatggcaaattcgctctttaaaaatggcgcacctgaaaaacataaaaagcaagaagaaaagccaggtaagttggcatctggctaccggcgtctactagaagcggctcttaaccataaaatcatcacttcgcttatcgctgttgccctgttagtaggcagcttgttccttacaccttttgtcggtgtaagctttctgccagaggaagaagagaagcttgtttttgccacttattcgcctaatgcagggacaacgtttgaagatgcagaaaacgacgtcaatgcagccgaggaagtgctccttgacagagagggaattgacgtattccaactttcccttggggcgcaaagctcatcgatggccatgatgcagacaggagataattcggcgatcttctacattcaatatgaagatgattttgaaggctttacacaagaaaaagaagccgttgtcgaggcgttagaagaagtaacggaaaacggcacatggactgggcaagacattgcgactggaggggtagggtcaagtgaattttcggtaacggtgtttggtgattcggaagaagacattgagccggcagttgaagacatcaaagcgcttctggaggagcatgatgacttggccgatcctgaaacgtctattgctgaccgttaccaagagtacacgctgaaagtcgatcaagaacgattgagtgaactaggcttgacaacagcacagcttggcatggctctgtaccaggtcgatgaccataatgccgttacgacagtggaagcagatggggaagagcttgatgtggtcattgcgacaaatgaggaagagtatggctcccttgaagaactaacagatgttgaagtggaaacgcaacttggtacacaagtagcgattgccgatctggtctcagttgaagaaggtacatcttcatcaacgattacaagaagggatgggcagatttatgcggaagcatcggcaaaaattttgtctgatgatgtagctggcgtctccacaactgttttaaatgaaattgagaaattagagcttcctgaaggggttgacgtccaagttggaggcgtaaccgctgatattgaagaatcatttacacagttaggaattgccatgcttgtggcgattgcgatcgtttactttgtgttagtcgtaacttttggcggtggacttgcaccatttgcaattttattctcactgccatttatcgtgattggcgcccttgttggcttgtttgtgacaggggaaaccattagcatttctgtgttgattggaatattgatgttaatcggcattgtcgtcaccaatgcaatcgttctgattgaccgtgtaatccataaggaaaaagaaggcctttccacgagagacgcacttttggaagccggaaccgttcgactgcgtccaattttgatgactgccctcgttacgattggcgcgttgattccacttgcaattggtgctgaaggaggcgggctcatttcgaaagggctaggcattaccgtcattggcggtttgacaagctcgactttgctcactttggtcatcgtcccgattgtttacgaattgttaatgaaaatgcgccggaaacttttgcgcaagtagcacgatcgccctctggcttataagccagagggttttttcatcatggtgcttttccatatcattcctcggataggcgtttttgctgtttggcattctataagtacaaacccaaggaggtgaaacgatatggcagacaacagaagctcaaacaacttgcttgttcctggtgtggaacaagcgcttgaccaaatgaagtatgaaatcgcgagcgagtttggcgtaaaccttggtgctgataccacttctcgtgcaaacggttcagtaggtggagaaatcacaaaacgccttgtgcaaatggctgaacaacaaatcggtggcaagcaattttaattcaatacacatggcgtaggcggcttcctagccgcctttttatataagcatgacaaatggataaataaggataaaaatactcatacatagttctttagcaaatggtcattctagtgttatagggaggtgaaacaacaatggcaaacaacagaagttcaaacaacttggttgtacctggtgctgagcaagcccttgaacaaatgaaaaacgaaatcgcaagcgaatttggtgtaaaccttggcgctgacacgacttcccgtgcaaacggttctgtaggcggtgaaatcacaaaacgcctcgttcaaatggcagagcagcaaatgggcggacaacaacgttaaaccctatatgatggcttgaaaggcggcttcatgccgcctttccttttttcttggagaaaaaaagaaggataacgatttcctgtttgacacacactgttaaaagaaccgatcaatggagggatagtgtgggagaactacttcaaacaagtgtagaactggcaattggcctagttgcattactaattttaacaagagtgatgggaaaaacatcgtttgcgcaaattaccccatttgattttatttcagccctcattttgggggaacttgtagggaatgccatctatgatgagaaagtcaaaattggggcgattttgttttctatttttatttggggcgtattgttatatttaatgggatggctaacacagcagtttcggaagtcgcgaaaacttcttgaaggcagcccatcgattattattcaaaacggccatttaaatcgcgccgagatgaaaaagaataaacttgatatgaaccaacttcagcatttgttgcgtaaacaacaagctttttccgtcagagaagtcgaacacgctattttagagaccgatggaaccattagtgttttaaagaaatcacagtacgacctaccaacttacgaagacttaaacgttcctcaaaaaccggtttatttgccggtaacatttattaatgatggcgccgttgactgggaaaaccttcataaagctggctttaacgaaaactggctcaaaaaacagcttgaccagcagcagatcgacaaattcgaggacgttttttatatggaatggaagcaagacgagggcgtttatattgaaaaaatgtaagaatgagaacatcggtgttccatccgctttaaaaacacgtaagtacaagcaaacaccaaatgcccttataaacaccggccacgccacaagggcaaagcccttttagcggacgtctgtttagttgttgtccacactgaggtaagtgcggcaacttggcttttcatttgacagaaatgtgaagatggttcaggtcccttgcgtaaccagcaagactgtactatgatgaaagcgatttacatcatgtgcaggatgaaaggttatccgaggtgaacttatgaccaataaactatactcgtcagtattgtcttttgcagcacttttgcttttgtcatcctgtgggtggatgtaccagattggcggagcgcaaagcgaatttgacgccaccgaagcagatttggaagttgccgattttgcttatactaatcaaaatggggaggaagtatcactaagcgattttgaaggggactattggttggctgacatgattttcacgtcttgtccgaccgtttgtccaattatgacccctaatatgcgagagttgcaagatatggcaattgccgaaaacttggatttgtcgtttgtttcattttcaattgacccagagaacgatacggttgagcatttaaaagggtatacggaaaacattggtgtaaacgatgcgtactgggatttcctaacaggttatgatttagaggaaattcaagcatttgctttggattcgtttaaagcacctgttgaaaaaacagaagacgattttctgcatagcacccggttttttctaatcgatggggaagggaaagttgttcggatctatgatgggttggcttctgacttaagtgacattaaagcagacatccaacggacagtgaagtaacgggataagaggaaggaaaggcgatcgggaagtcgatttcgcctttttttatgttggctgggttttccgctttttaaccacgacgcttatttatagtatagtaaattgataatatatacttgaatagtatgttttgtgaggctactatatgatgtaaggagggtggttatggatttaagaagcattaagacctttcaaacgattatcaagcatggcagctttcaaaaagctgcagaagagctgtcctacgcacaatcgacgattacgatgcaaatgaaaaagcttgaaagtgagctaggggtcgttcttattgaacgtgggaagccgtttcaattaacagaggctggacgtctcctcgctttacaaggtgatttgctccttcaagaatttgaacgattacaagaacggatggatgcattagtaaaaggagaagctgggcatatccgggttggtgcaatggaaccagcagctagctatcgcttgccttacgccctcgcaccgttttacgaaaagtttccgagggtaaatgtcagcgtccaaatagaaagcagcagaaagctaatcgagatggttgaggccgatgagcttgacttggccatttgtacagccgcgaatgtgccgacgacagttggctttttgccgctatttcctgaagaggtcgccatattaatgccagatgcccatccccttgctaatgagaaggacatttcattgccccagttggaaaacgagccaatgttaattacaacagctgcgtgtccattcaggagaaacattgaaaagcaaatgcgggatcgtggactgcggccaacttatcgaatggagataagcaatatgttggcgctaaagcattatgttcaagccggatatgggatagcagcggttcctatccgttgtgtgatgcctcctccaaaaggaacagtcttgaaggcgatccgcctgtttgaggaagatttgttagtcggtcttgcggaaaataaaacaaaaccgtttggcagagtagcgacatcgcttaaaagcattcttcaaaaaaacctccgatatgaaaaggaaccaattcaaaaataatgaatagaaacttcatttttttcaattatacaaaagcgttatctttcgttatagtattattaatccgataggttcactttaatttaaaggggggattgtgtgggtaagactgtatttatatatggaggaaacagcaaacagtccaggttgatcggtttatggcaaaaggcttcttctgttttcgctgagtacggcgaaaaagtggaaacaatctttgttcatgagttgcctggaaatgacttattggcggcaaaccctaaaagcgaagcggtacaacaggcgaagcagaaggtggaacaagcgagcaccattgttgtgtttactccgatttataaagcgtcatttagtgggattttaaaaacgttccttgatttgttgcctcaaaaagcatgttccgaaaaaatcgttttgccgatagctattggcggtacttttggccatcttcttgcaattgactacgcacttaagcctgttttagcggccttaggcgcgaccaccattcttagcggtgtttttgtgctcgatcaagacgtaaaacaagaagaatcaggcacatatgtgttaatggaacaagcgaatgaacgactcgaacaacaagtgcgtctcgctcaaaaaacggcgcagtcggcctttataaccaactaaatttatgagaaaagaaggaaacgttatgagcaataagatgaagcttggagtgtttttaatgggggctggccaccacattggtgcttggcgccaccctaaagcagcagctgatgcctacgaaagcatcgacttttataaacaagtggctctgttagctgaaaaagggaagcttgatatgttgttcattagtgatgccctgtctttgacagaaaaaagccatccgtctgagttggtgcgattcgaaccgcttacgctcgtgtctgccctggcaatgacgacagctaaaattggattggccgctaccgcaagcacgacttataatgaaccgtttcatatcgcccgcaagtttgcatcaatcgaccatttaagtaatggccgttctgcttggaacattgttacctcttattacgaagaggaagcgcacaacttcggcgatttgcctcacccgccacatgccgagcgttacgaacgagcagctgaattcgtcgaagtggccaaaaaactgtggcgtagctgggaaagaggggcagtcatccgaaatcaacaaacaggggtttactttgacgcaaacaaagtccatgccgtcaatcataaaggcaaatatttttcagtcaaaggccccttaaatgcatcggcgctgccgcaaggggagcctgttctcattcaagccggttcctctacttatggcactaagtttgcagctcaatacgcagaggttgtctttacagcgcaacagcatttaaaaggggcgaagcgattctaccgtaacgtaaaagagcaagtcgccgccgccgggcggccgcctgaagaggttctcgtgatgccaggcatttcgccgataacagccaactcaaaagaagaagcggaggcgatttacgaagagttgcagtcgctgttggatgaggaaacgagtttggcttttttatcagactacttaggtaaagtatctttttcgagaaaccagcttcaccaaccgttatcgattgctgacttgccacctacaaatggcaaccaaagcaggcgtgacctaattgtcgagcttgctagccgcgagcaattgactgttttgcaattggcacggcgtgttgctggggcgagagggcaccatattgtttgcggttcccctacacaaattgcagatgtcatggaaacatggtttcgggaaaaagcagcagacggctttaatttgatgtttccttattacccaggcttaatggaaacatttatcgaacaggttattcccattttgcaacaacgagggctgttccgccttgattatgaaggggaaacattacggtctcatctcggtttacatgaacatcaagtttaaaaggaggaggagctatgaaaatcgcttttgttttaaatgaatcagaagacattgtcccgattacagaagggctcgttctgcgtgtttatgatagcttgtcgaagagctacaacgattactctaatccagctttagaacgaaaagaggggaaacggtccgctgcactccaatttgctattaaacagggcgcccatgcgttggcagctccgcctgaaacattatgcgaacagtcatacaagtttgcgcgtaaagagcagctatcgtttatttctttgcctggtccggtcccattcaaccaaatcatcagccaaccacttgccttgacggaccagctgcccaaaaaagaaattatcccaagtgtttaacagaggaaaggggtttataacggatatggcaaccgaattgcaacacggtgcggcaattgagatcgatcagctctacaagcaatttggcaaaaaaaacgttcttcaaggcatagatgcaaccatacatggaggcgaatttgttgctgtagtagggaaaagtggctgcggcaagagcacattgttgcggcacgtggcggggcttgaaacggcgacttcaggagaagtgaggcagaatggagaacggatcgacggcatcaatcagcaagcatgtctcatgttccaagactcgcgccttttgccgtggcaaaatgtgctaaccaatgttggcgttgggctccgcctcgaaggagagtggcaacggcaagcagcggcgcttctcaaagatgtcggcttggatggtcggggcaatgactggccggctgtactatctggtgggcaaaaacaacgcgttgccctagcccgtgctcttgcaggcggaccgaaactgctgttgctcgacgaacctcttggagccttagacgcactgacccgaatggagatgcagcagttggttgaaagactgtggcttatacatcgatttacagcgttgctcgtcacccacgatgtcagcgaagcagtcatgcttgctgatcggatcatcgtgattgaggaggggagaattgtgatgacgaaagacgtttcattgccacgtccccgtgtaccaacggcgccaggttttgctgacattcaggaaacgatcttaaatgaattattaggcattcaggcggagaaaccgcttttgcagcaaacgaattaaaggggatgaggaattggttgagtttattacaatggcacccacttcaggagatggcactagcatttccactgggaatgctggctggacaacggcaaaagggacaacgcagcgtgagccttctttttcctatataaaggcaattgccgaagcagctgaagctggcggctttacgtcgctattgcttccaacaggcgctggctgtttagattcagtagcggtagctgctaatttgattaactgcacccaatcattgaaatttttatttgccgttcgacctggcgtcatgtcgccaacgacgtttgctaagcaatttgccacaatcgacaattggtcggaaggcagggcgcaagtgaatattgtcacaggcggttcgccaaaagaactggctggctatggcgattttttgcctcatgatgaccgttatcgtcgtacagaagaatatatccatgtgttgaagcgtctattttcagaaaaagaagttagtcacgcaggagaattttatgagttaaaaaacgctacgttgtttccagcattaaagcaaacaggcagtccaaaaattttctttggcggggcctcggaaacgggaaaacaagtagcggcaaatgtcgctgatgtatatatgatgtggggcgagccgcttgaaatagcacgggagcgaattaacgatatgaaagcgcgttacgcaagagcgggcagacaagcaagctacagcatttcttttcaagttgtgctcggaaaaacggaagcagaagcatgggcaaacgcgaatgcgctcgttcaacatttagcaccagaagcccttgaacaaaaacagcaggacagggcaaaaggcgattctgtcggtgttaatcgccttcatgatttgatggaagcgagccgtaaagacaactttgtcattggccctaatttgtgggcaggattgacacaagtactgtccggcaattctattgcccttgtcggcacggcagatcaaattgctgaccgtgttgttgaatttgtcagtcttggcttcgacaaagtccttttgcgcggttttccccatttggaagtgataacggaaattggcgcagacgtgatcccgcgtgtaaatgagcgcctatcccacgccgtaccacattaaagggggtgacattgttgagaaagatggcagtttttggactttcgtttggggtggcggtagtgttggcggcatgcaatgaccctggcgcggcagcggagaaaggcgaaacggtgacaattggctatcagaaaggagcgttaacgctgtctcttaaagaagatgaggcgttcgcgaggacaatggctgatttgggttattcccttgaatgggcagaatttaatacaggcagctctacacttgaagcattagggagtgggagcacagaccttgccaatgccggggatacgccttccatttatgccattgccaacaggcagccgatcgattacattgccgctacggataatgccccttacagtgaaggcattttagtccgccccgattcaggcatcgatcgcgtggaagatttagatgggaagcggatcgcctttaaccgagcatcaatctcccaatatttgttgtataaagcattagactcggttgggctgacttttgcagatatagagcctgtgtatctagggccagccgatgcaaatttggcttttgaacaagggaatgtagatgcatgggtcacatgggatccgtatttagctgtctctgaagaaaaaggcaatcatgtcattgcgacggcggacggccttgcttcctatcgatccttttactttgccaacagtgattttgccgatcaacatccagaagcggtactggcgtatgtcgaggctttgcaacgggtagggactacgattgaaagcgacgcaagcgaggcggcagcgattatggagaaagcgactggattgccgcaagatacgtggattggcattttaaaccgtctcgatcatgttcctgactttattgatgaggaggcagtatttgacctccaagaacaggcggatgatttaatggccatcggtttgctagaagatgaagtgtccattgttgattatgtctgggatcgagaggaggaaagtgaatgaacagttggcgacaatggtaccaagatggagtagcgccatggattgtgcccctcttgttactcctttcttggcagtttatgagcgtttacggtttgttctcccatttacttgcaagccctttggaggtcgtccaagcagcgtggcggatgattgcgaatggggaactggttagccacatggcaaccagtttttatcgagcgttggcaggctttatcataggaggcgggcttggccttttgcttggcattgccaatggcttatccccattttcaagaaagtatttagatagtaccatccaaatgttgcggaatgtgccaaaccttgcactaattccacttgtcgtcatttacatgggggtaggcgaaagtgccaaaatctttcttgtggccgtcggtgtgttgttccctgtatacattaacacgttccatggcattcgctcgattgaccaaaatatgctagaaatgagcaaaatgtatggattatcaaaatggaagttattcactaaagtgatttttcctggagcactgccatccattttagttggcattcgttacgctttaggcgtgatgtgggtaacactaattgttgccgaaacgattgccgccacttcaggaatcggttatatgtcgatgaacgcaagagagtttatgcaagtggatgtcatcattttagccattctcctttatgcgcttttagggaagctggcagatacgttggcaacgtttgccgaaaagcggctgctgcgctggaacccagcttaccgttgacccatttgactaaaaatgggtctatcacacaaagagaaaaacgtccaaagtttaaaaccaacaagcagctcgtttttaatcaaaacaagctgcttgtttcgttgggcgtttatgtgtttatattactccttgtgcgatcatcgcatcggctactttaacaaagccagcaatattagcgcccactactaggttgccaggagcatcgttctcttttgccgcttctatacaatctctgtaaatggtcttcataatgtcttggagcttcgcgtcgacttcttcgaacgtccaagaaagccgggcgctgttttgcgccatttctaaagcagagacagaaacgccgcctgcgttcgccgcttttgctggagcaaacagaacaccatgttcgtgaaacacgtttaccgcttctagcgttgaaggcatattggctccttcgccaattgcttttacgccgttggagactaaaacggtcgccgcgttttcgtcaatttcattttgcgtggcacaaggaagagcaatatcacaaggcacagaccaaatgtctgagcaaccttggaaaaagtgagcttgtgggtgttcgtttacgtattcgctaatccgttttttctcgctttccttcaaacgtttgaccgtttccaagttaatgccgcgtttgtcgtaaatatagccttctgagtcgctacaggcgaccactttcgcgccaagatgcatggctttttccatcgcatagatcgatacattccctgaccctgacacgacaacggtgctccctgcgaaactatggcctttttctttaagcatctcttcgacgaaataaaccgttccataacctgtcgcttcttttctggcaagacttccgccgtaagcgatgtcttttccggtcaggacgcctgcttcaaaacgaccgcgcatttttttatattgaccaaacatataaccaatttccttggcacctacaccaatgtctcctgccggaacatcggtatctggtccaatgtatttgctcagttcagacatgaaactttgcgtaaagcgcatgatttcgccatcgctttttccttttggatcgaagtctgaaccgccttttccgccaccgatcggttggcctgtcagtgcatttttgaagatttgttcaaacccgaggaatttaatgatgcttgtattgacggaagggtgaaaccgcaacccgcctttatacgggcctaaagcactgttgaactgtactcggaaaccacgatttacttggacatttccttggtcatcgacccacggaacgcgaaaagagatcattctttctggctccacgattcgttcaagtatagcttgtctaatatactgtgggcgcttagcaaggacaggcaataacgagtccaacacttccttgactgcttgatgaaactcgttttcatatgggttccgctgttttactgtttcgtagacgtgttgaacatattcgtgcacgtcactcgtatacgttcctttctctttttccaatacgttcattgatatggcctccccattcagtctgaatccaatctatggaaatgaaatcgttttcaaggtcttggcatagaagactgcccttttgaaacaggattcgctatctgctatcaagtattttataattaagtgaatcatctaatcaatattaataactgatggatttaatgccttttttagatgaatgaaagggagagctgcgatggaaatcagacagttgctatattttatggaagtagcgaaacgggagcatgtcaccgaagctgcagcggccttgcatgtcgcacagtctgccgtcagtagacagatctttaatttagaaagcgaattaggcgtcgatttgtttattcgagaaggccggagggtgaaattgacaccaatcggtaaaatttttttagagcgaattaaacatgctatgaatgtgattgatgatgctaaacgggaagttcaggagtatctcgatccgaaaaagggaacaattcgcgttgctttccctatcagtttggctgcttatacattgccgacagcgatctatgcgtttcgaaagcagtacccggaagcgaaattccagctcaaacaggggctttatcgtgaattaatagacggggttattaaaggggattacaatatggcgctgattggcccagtgccgatggaagaaaagaaaatcacccctcgaattttgtttgcagaaaggattgtcgctcttttaccaatacaccatccattagcgaaaagcgccgaaatcaatttgcttgatttaaaaaatgatccgtttgttttgttgcctgaagggtttgtttttcgggaccttgtcattaatgcctgttccgaaataggcttcgtcccgcaaattgcttttgaaggagacgacattgatgcgttaaaaggcttagtgtcggctggtcttggcgtcacattaatgccggaagtcacactcgttgacaatacgccgcgctcaactgtaaaaatcccgttaagtgaaccgaatgtcacgcgaaccgttggagtcattacaccgacggagcgagggctgttgccaaccgaagagttgttttatgaatttttgcaggagttttttacgaagctgaatcattttaaagattgaatgcttgtttttttgcccccaaagtccacgtttatgggaatataggtgtccacagttggatagtaaaaaaaataggttgaaaaaaagacaattaaattataatatgaacatataatcatatatagggggtatggagatggaaagcaactatgttgatttagatgaagaaacgttgtttatagtctcgcaaacattcaaagcgcttggcgacccaacacggatacgaatcttgcatttgcttgctgaaaaagaatgtgctgttggcgagattgtagaagcgttggcgcttggccaatcaaatgtgtcccatcagcttcgttttcttaaaaatttgcggttggtaaagtcgcggcgagtaggaacggccatgtattattcgccagaagacgagcatgtaatggaaatactagaaaagacgatccaacatgccaaacatgattaggaggggttaggatgggacattcccatgatcacggccattctcatggagttggccatagccacattcacacgaacaataaaaaagtgctactgattgcttttgtgcttattaccctgtttatgattgttgaagttattggcggcatcctcacaaatagcttggcgcttttggctgatgctggccatatgttaagcgatgcggttgccttagggcttgcactagccgcattcaaatacggggaacgagcagcgagcaactcgaaaacatatggctacaagcgctttgaaattttggcagcatttataaatggcttaacattgattggcatttccggttatatcatctacgaagcaataacacgttttgccgagccaccagaagtggcaagtgttggtatgcttgttgttgctgtttgcggtttgcttatcaacatgattgtcgcttggattcttatgcgcggttctgatgtgaaaggaaatctgaatatgcgtggcgcatttctccacgtacttggtgatttgctcggttctgtgggcgcaattgccgccggcctcctgatgctttttttcggctggtcaatagcagacccaattgccagcctgcttgtagcggcattgattttagtcagtggcttcagagtgaccagggattcggtccatgtgcttatggaaggcaaaccggcatctgtggatgttgacgaggtgaaaaacgaattgcaatcgctgcctggcgttttaagcatccacgatttgcatacatggtcgattacgtctgattttccagcattgacggcacatgtagtcgttggacacggtattgaccgcgacgacttgttgaaaacagcaaagcgtcttctccatgaccgtttcgggatccaccatacaacgcttcaactggaaggcgaagaaaagcaatgcaaccactcgtgtaattaatgggaagaaggggagaatttacggacgaaatctgccaaaatgtaaaatttgttcggatatttatctaagcgcccgtcatttgtgttacaataggaacgaattataccatgaatctgtatgtgactggcgcgaagtggataaccacaagggagcatacggatcaaagccgtgcgcctgggcaaaggaagaataggaagtcttccttatatgttccgaataaagaaaggatggttttaggtggcagagcctatgattttggatggaaatgacgtttctaaacgaataaaagacaaactagcattgcaagtcgcagccttagaacaaaaaggggtacgcccgtgccttgcgaccattcttgttggcgatgatcccgcttctgcaacgtatgtacggatgaaaggcaatgcctgcaaacgcctcggcattgaatcgaaaaaaatcgagcttcctaaagagacaacgacgaaggaattgcttgccgtcatccgcgagttaaacaacgacagcagcgtccacgggattttactgcaacatccagtcccaagccaaattgatgaacgtgctgcatttgatgaaattgcgatcgaaaaagatgttgacggcgtcacaacgctaggctttgcccaaaatgcgtttggttttgcccattatccctcttgcacaccggctgcgattctcgctattcttgaccattaccagttgccaatcgaaggcaaacatgctgttgtcgttggccgcagcccgattcttggaaaaccggtttcgcaaatgttgttgaaccgcaatgcaacggtgaccatttgccattcgcgcacggaaaacgtaagtgattttgtcgagaaggctgacatcgtggttgcagctgtcggcaagcccaactttattcaaggagaatggataaaatcaggggctgttgtcctcgatgccggttacaataaaggcaatattggcgactgtgagtatgacggatgcgcccaacgagcttcagcgatcacgcctgtacctggcggtgtaggccctgtaacgatttcaatgttgctgaaacatacggttgaggcggctgagcgatctgtctaacttcatataaacggcaaacaggctcgaacttgtatgccagctgatgtatcggtcatttacacgaaaagaacgcccattgcgggaaacgcaacgggcgtttagacgatagataaagttcgaatgatgccgcaattgccctacggtgcctcactgacaacgatgccacatgcaatccgatcaccagcatcgccggtagcttccgtatctgcatcagggccgccttcctcttcaccttcggctacatagcgttcaggaatgtggccaaagttgtcagggtcggcatggacgatgacagcccgttcatctgccaaattagttggagtaaagcggtcggtcgtaaacgataaaaaggcactgccatcttcgcttacatagagaggtggcatgtcgccactatgaccgctatgcgccccgtcttcatcatggaaatgcccacctgctgattgaaaaggcccttcgttgttacccgcgtcacaggctgcttcttcatggacgtgaaagccgtggtatcctggaggaagcccatcaacagtcacatcgacccttgttttgttttcaccttgttcaaaaaaagaaacatcgcccacacggcttccttgctcgtcgtttaattcagcaaaggcgtcggcttgttcttgctcgccattgtcaggagccatgccattgtccccttcttctggcaagtcaatctggtcatttccgcacgccaccagcattcctgctgctgcgcatacccctactgctttacggagctgcatgttttcgtccccctccttggatgttcatgtgctacagaactatatcacaaattcctctttttaaaacgtcgaaaacaaaaatgagatcagccaatatcagcatgggcttttaaggcttgttcggcaatcatccaaacgtgttcttttaactcggtcggggaaatcattttcaccttgtttccgaagccaacgatataggctgctgcctcctcttttgtatcgaaagacagcctagcagttagccagccgtcttcgcctgattcatagaggtcgagcacacggacataacggcctgagttgtgcaacatatctttttgttcataggcaacgagaaggttaacttcataggaaggcagtgttcgaataaacgcgttttttgagtcatgccagtagcgggccaaatcgaagttttctggccgttcaaaccgctttggcaaaagctgcgccgaacgaatccgggacgccctaaatgttttcagttcttgttgttcagctgcgatcaagtaccaagtgctgcctttggcgacgagccctaaaggctccacttcacgttctgatgcagtagacccgtatttttcataagagatagacagggcgcgctgttcccacagcccttggttaagcaaactgaatgcctcgacggtttcttttttgccacgccaagtgctagcgtcaatgtagatgcggttttgtgcgtcggcaaagtcaacagacgtggcagaggataaagaagccagcaatttttcgcgcgcttcttgccagttttttgtgtagcctaagtcgccaagcaagtcgattggtggggaaagaaacagcgtttttacttcctcttttgttagaccagttaactgtgttctgtaaccatctagaagcttccagcctcccgtttttccacgctccgcataaacaggaatgcctgcactgcttaatgcatccatatcgcggtggaccgtccgctctgaaacgccaagttcctcggctaatgcttttgtcgaaatgatttttcggttttgcaacaacaatacgattgataagagtctttcagctctcatttcaaccacgcctttttcttttttatatatgacattaggtgtcaactttagtggatatagtaaacatacatgaggaaggaggaatatgcaaatgaatgctttatcaaacaaagtagcgctcgtagctggcggtacgcgaggggcagggcgtgggattgccgttgagcttggcgcagccggtgcaatcgtttatgtgactggccgaacaacaaggacagaaacgtcggaatacaaccgacctgagacgattgaagagacagctgaactagtaacaaaagctggcggcaaagggattgctgtccaaaccgatcatttggtgccagagcaagtggaagcgttagcgaataaaatcaagtcagaccacggcaaattagatattcttgtgaatgatatttggggtggggagttactgacggaatggcatgttcctatttgggagctgtcgcttgaaaaagggtttcgtctgttgcgactagccattgatactcatttaatcacaaaccattatttgctgccgttgttaattaaacaaaagggcgggcttgtggtcgaagtaacagacggaacgaaagcctacaacgatactcattaccgcctctcgatgttttatgacttggccaaaagttccattatccgcatagccgagggtcttgctcacgagcttgctccgcaccattgtacggctgtatcgctcactccaggatggctccgatcagaaatgatgcttgaggtgtttggtgtcacggaagaaacgtggcgcgacggcctgaaaacagatcctcatttcgccatttcagaaacaccccgttttatcggcagggcgatcacggccctcgctgccgatggagacaggcaccgttggaatggcaagtcgctttcaagtggggaattagcaaaagtctatcactttaccgatgtcgatggctcacagccagattgttttcgctatttgctcgaagtccaagaagctggaaagccagcagatgtgagcggttatcgttaactagacgttcagccacctgaacaagcgatattagagaagttcaaaggcttgctcgataaaggcattgtgttgcgacaggtttattttgagagcaaggaagggatgaaaccgttagacgtggaaggccgcccaattgggttgtatattggaagctaaaaaacagcacatgcagcgattgcatgtgctgggtgtcttttttaattcacggcttgaatgccatcgttgcgttaacggcgtttttccagcctttgtataacgcatctcgctcatcggcgttcatttttggttcaaatgaacggtccatattccatttgcgggcgatatcttctttgcttttccagaccccaacagcgaggccagctagataggcagcaccaagcgccgtcgtctctgtaacggaaggaatttcaacgggtgcatcaaggagatcgctttggaattgcattaaaaagtcattagcaacagcgcctccatcggcacgaagctttttcgattccatgccagcgtcttgttccattgctgccatcacatcttttgtctgataagcaagtgattccagcgtggcacggacaatatgagcacgctctgtgccacgggttaacccaaacatggcgcctcttgcttcgctgtcccaatatggggtacctaggccaacaaatgcagggactaagtagacaccatcagcggacgttactcgtgtcgctaacgcttcactttgcggggcattttcaataattttaaggccatcccgtaaccattgaattgccgaaccggcaacaaatacactgccttcaagggcgtactcaacttttccatcaattccccatgccagtgttgtcaaaagcccgtttttcgactcaaccgcttgttctcctgtattcatcaaaataaaacagccagtgccgtaagtgtttttaaccattcctttttcaaaacacgcttgcccgaataaagccgcatgctggtcaccggcgacgccagcaattggcacattttccccaaagaaatggtagtcaacggttgtggcgtatacttcagaagaggagcggacttcaggcagcatttgctttggaacatcgagcagttcgagcagttcgtcgtcccatttcaactcgtggatattgtacataagcgtccgagctgcatttgtataatcggtcacatgagctttgccgccgcttagtttccaaatgagccatgaatcaattgtgccaaacaacaggtcgcctttttcagctttttctcttgcgccatctacatggtcaagaatccattttacttttgtgccagagaaataaggatcaagcaataagcccgtttttttacggaatgtctcgttcaaccctttttcccgcaaatcagcgcaaatcttttcagtttgccgtgattgccaaaccaaagcattgtatatcggttttcctgtgtgtttatcccatacgactgttgtttcccgttggtttgtaatgccaattccagccacatcttttggctcaacatcggactcggaaaagacttcagcgatgacggcaagaacggatgtccaaatttcattggcattatgctctacccagcctggatttgggaagtattgcgtgaattcccgttgcgccgtttttttgatttctccttggctgtcaaataaaatcgcgcgtgaactagttgttccttgatcgatggataaaatgtatgggtttttcatcaatatcgtctcctttgtttagaaaataagggtataaagaacagcgccaacaataccgccaacaaatggtccgagaatgggtacccatgcataagcccaatcggatggcccttttttgttaattggcaataaagcgtgggcaaggcgtggccctaggtcacgtgctgggttaatggcatagccagtcgtgcccccgagagaaaggccaatcgcaatgatgagcaagccaacgacaataggattcaatccttcgctgaatgtgttggcgccaatagccaataacccgaataccaatacagcagtgccaattaattcgcttaagaaattggctgggaggtggcgaatcgcgggaccagttgcaaatacgcccagtttaactcctgcatcttccgttgccttccagtgtggataataatgaagaaagacaataacggcaccaagaaaggctccggctaactgtccgattatatagccaggtacttgcgcccaaggaaactgtccgatggcagcaaatccaagcgtgacagcagggttcaaatgggcgtcactcacagtgccggccacataaacgccaagcgctactgcaaagccccagcctaccgaaatcgcaatccagcctgccccttctccttttgattgttttagcgtcacaccggcgacaacgccagcaccaaaaatgataagaaccatagtgccgataagctctgccatgatttctgccatttttcgtacctccttcatagtgtcaagccgaaagccaaattggaagaaacgaaactgcatttgcataaaaaagggcaaccttaatcacagggtcgcgcaggacgctgttataaggctgcctctcatttgctcatcagctctcactttaacttgtccccgcattatatcctgttttaacaaatttgtaaacggatacatcgacaattgggaaaatctacacaatgactctttaaaatcgtattcgctcttgcaaagggtagaactatttttagctttggaatgcctttttattagcctatggatgagcgatgaaaggtgaaaaaagccgtgtgggaaaggacggaaagaacggatataaggtagggctagtgtcctcgtctgtacgtctattgaacaagcgagcctgtgtaatgtttagacaccgtcgccaatctcaatggtcatctgtactgcctaataggaggaaaaacggctaggcgataatgaataggaattatacattgacaaatggaaaaggaagcgtttacactattaccgaaaccggtttcgtttgcgttctcttaatgattcgtacgtgaatgattatggtatgataatgtcaggcacgctttgggcaacagctccgctcattgcgatctttttgctattcaaccgtttctttattaatagcctgacgcaaggcgcagtgaaaggatagagtcgtttgaaagagaaccatgcaattacgattaaagacattgctaaaaaagccggtgtttcccaagcgaccatttcaaaaatcctaaatgattaccctgatgtgagtcagaaaacaaaagaacgggtttttcgaattatggaagaagcaggataccggccttcccactctgcgcgcacattggcgcaaaaaacgtcaaagctcattggcgttgtttatgcagggcggataaatgcagattttgaccacccattttttattgaagtgctcaacgcgtttaaacggacgattggcatgcacgggtacgacttgttgtttttttccgatgaaacattccaaaaggaagaaaatttctatgccagatgcctttattataaagtggatggctgcattattattgctggggaagatgtccagcaatcgattgaggatttaacaaaaagtgaaattccctgtatcggcgtggacattcaattagatgggccaaagtcaggctacgtgatgaccgataacaaaaaaatttcccaatcggttgtcgactatttctatttgcaaggccaccgtgatatcgcttacattggaggggcaaacgaatcggctgtttcgaatattcggctaaaagggtttcgcgaaagcattcatgaatacgggctgacgctccgcccagaatgggtaattgaaggggatttctttgaacaaagtgggtatgaggcaggtttgtccttgtttaagggaaacgctcagaaaccgacagctgttttttcttcctctgatttgatggcatttggctttatgagggctatgcaagaactaggagtatcgataccaggcgatgtctcgcttgttggctgtgacgaccagctagctgcaagatacgtgcagccgccacttacaacggtccgccaaaataaagagaaaatagggagactcgctgcattgatgttgcttgattttattgccggcagggcaagtacagcccggattttagtcgaacctgagttaattggtcgtgaaacaaccgcttctcttttgctgtaacgtaacattcgtttcatttgtcgctagaatcgcgatcgaaaaagagtagtggtttgtttttttggtcgataacgaaaccgatttcgtttgcaataattctaggaggcgtcatatgaagaaacaatggtccgcagtggtattgggcatgttgctcatggctccgatcgagcaaatatctgctcaatctgtcgtcgaggaagtgggaaaaggaagctattcactcgaatatccaccgattgatttcgattcaattgctgatccaggctacgctgagcaacaacaagaacctcctgagcacatttaccgtacggaaaacgtgaacgggccaatgccaacgaaccgttggtggagctctcttgcagttgatcggttttcaaacaaccactatcctcatccgtttagcgtcaagcatcaagaaaatggtttaaatgtgttttatgatgcacctcataatgtcgttgtccatgaaaatgccgaggctggcacgtggcatattacaggcgcgatctcaacggactttaccattggccattcggctaccgcttcgtttgatgatgccaaagtcgatgtctttagcgattggtacgtgagtgggttgttgcaagacggcgatgccatgcttcgcctcacttatggcgtcggttccccatatatatttgccgagtatgaaggggggcatgcggagatcgatttcccaattgagccgcagatttgggccaatcaaggcaatgtcattggtttttccacccatgacaataagcattatgctgtctatgcgccagatggatttgactggcaacttcaaggaaataaatggggaaatgacgcgtcgtttatctctgtggcgaaactgccggaagcaaccgatgagctcctccacacatttgaagaatatgccttttccgttgtacgtgactcaagggcagaatatagcgttgaccatgatactggggaagtccgcactgtttattcagtagaaaccgaagcaaaggtcgcaggagcgaaagaaggcaccatttttgctttatacccccatcaataccaccatttagcagcaacttcagaaggacaattgttggagcaaacgatttttacgattcgtggggatatgaaactgctcccaggcaacgaatttgaaacaacacttcaatatacaggcgtattgccgagcctgccaaatgtcgggaccgataccgatcgcttgcacggatatttgcaagaagcacaagccgattacccaacaggccaagatacgtatgaacttggcaagtatttagggaagctagctaaccttgcgccaattgccgaccaagtaggtgacgaagcccttggcgattcttttcgagatgaactgcgagtgcagctggaagattggcttgtggccacagacgaggatggacggctaaagagcgaaaatcttttctactataacgaaaattggggaacgttgcttgggtatcatgccgcccatggatcagcggtacggatcaatgaccaccatttccattacggctattttgtgaaagcagctgctgaaattgcccgggtcgatccagaatgggcaaacgatgaagagtggggcgccatgatcgatttgttgatccgtgactttgctgcggggcgcgatgatgacatgtttccatacttgcgcatgtttgacccttactctgggcactcctgggcagacggcctagccacgtttgactcaggcaataaccaagaatcatcttctgaagccatgcatgcttggaccaatttaattttatgggctgaggcaacaaatgattcggaattgcttgaccgcgctatttacttgtatacaacggaaatgagcgctattaatgaatacttctttgatgtctatgacgaaatccatccggaagcatacaaacctgaaattgtgacgatcaactggggtggcaagatggaccatgcgacatggtggcattctggcatggtcgaaaaatacgcgatcaattggctccccctgcatggcggcgccttatacttaggccatcatcctgattacgtcgagcgtgcctatcaagaattgtatacgcgcaatggctcaacggattggaacttgtgggcgaatatggtgtgggcgtatcgtgctttaaccaatccaagcgatgccgtctcgcaaatgaacgccaaaatcgatgattatggcgagtttaatccaggggatgaacgaattatcgaaagaggcagcacgaaagcacagacgtaccaatgggttactagcttgcatgcccttggccaggtcgaccctaccgtacaagccgatacgccaacatatgctgtctttaccaaaaatggcgagcgtatatatgtcgcctacaactatcgtgatgtaccaacaacagtgacgtttactgacggccacaccgcccaagtcgaggcaaatagcttttacacgaacgccaccgatgtggggcctccgattgaacagccaaaccctggccctaatccagaacctaacgagcctgggaacggagaccaacatgagcatgaccattattctgttacagttgcacaagatcataaccagacggtcattgctttttcaccaacggcaccagctcgttacgttgactttcattatcgtttaaatggcggcgaccagcaaaatgtccgcatgaatgaaggaaacggacaatggcactattccattcaaggtgtaagcggaggagatgaactaacgtaccggtttacgtatgaacgagaagggcctcaatacgagacagagtggtacacatttaggccatagcgtgtaaatgccaagctagcctgttaaccggagcgaccaaacggcggttaacaggctttttttgtaaaacaaacgtgattagtatcggtatgtttgcggttgagggtgttctgtatagtaatgcttgtatgaggcggttcctttcggatgctgccctttctcgttgcaccatgtcggcggccctagaatgaccgattcctgaatcggtgccactacgttttcataggcgttgccattgacgcaataagcaagctccatcatgctgcccggcgtaaagcgaaggaagtcagaaccgtagacgatatcaggtgtcggtttatcaaaaatcgtcagtaaatgagttccatctgttaaagcgacaatccaatgaaaccacccttttggcaagacgaccgcttgcccaggaacaagctcgtatgtaagcagcttttgggagaatggattaaaaacggatgcctgtactttgccgcaaatgacaaatacaagctctgaggcgttcgtatgccaatgtggcgtgatgacaatgcctgtgctcatatggacattaaaaaatcccgtggggatggcgggaagttgggcagcaaacaactgagtaatatagttttgcggatctcgttggtaattaagtgttcttgtggagtcgcctgctaaattcaatgaaggtgactgcaacacggacgtattcatgtacactcctcccttttttgtcattgtatgcatagagggaaaaggttagcacacttagagtttgttcccaccgtaatcctagctaagttaaacgcttatttcattcactcaagaaaaggcttcttggcaaatgccaagaagccctaaagattgcttacgtttcgacagcagtgatgtcatcgcaacaaatggttacgattcttgattttttgtggcagtcacaatttgctaagaacactaagtttttgcggacatcaacaaactcgccacggacgcagcctccgccttttagaaagacaacgacaaattggccacgggcaatgtgtttaaagaaagaatggcaatcgcatttgtccctgtcatgtcggtcgtgtcgctcgtgtcgctcatgtcgatcatgcttatcgcacttatcgtgcctgtcacacttatcgcacttgtcgtgtctgtcgtccctatcgtgctttttgtgtttcttgtgtttatgggaaaaatcttcaaagttgcttgagtagctgtaaaagctcatgttttattccccctttctgttctatgctagtactatatgtacgattccgttgtttgcataggcaaggcaagcagtacattcgcacgttttgccataaacaaacaaatgctgatagatagaagtctaatggggtttttgccgaatggctcgattcttatctagtatgtgttcatttgctttcacactgtgtgattccatacagtgtttttttctgtctcgtaaatgggtgtccttaaaaagctgattcgtgtctcagcctctagtcgcagacgaagttcaatctgccgctcgttttgccaaacggcgcaactgtctacaataaatgtatggacgacagaacttacaccaaaggaggtgaacgacattgacaaaacgtggatggatggtcgttgcagccattgtgcttgcaatcatagtgctatcatcgctaggggcgatcattggcctaggcgcaggcgcagtattggcatactttggttggcgccaagctgccctaaacaaccaaacaattatgaaagtgctctggtgggtgattttgcttattggcgtatgccttgcggttggcagcttgccaggaatcatcggtgtcggtgctctttatttgctagtcaagctttatgagaaatggaaagaaatgaaggaatatgatttcgaggtttaatatagaaaacaaaggagagttaaacgacatgtcttttctaaaacagctaaaagaacaagtgcaagctgacattgaacatgtgcttgatcgtaacgacaagccttttcaaacagatgatggcaagtatgaagctgaatcaaaaaaactcgacaagcagttgaaattatggaaacaatcgattgaaaagcagcgtaaactagaacgttacttttaccaagagtggcaagacgccaaaaagatggccagcaaacgggcggagcaattagaaatcgctgaaaatgccggggtggaagaattaatcgctcaagcacaaagtgaattggcagcttatcaagaacttgcaagtgaatacagtgattcctacgaagagcaaaaagaaagagtgaaaaaattagaagcacgaggccgggagttggaatttctccgcaaaaaaatccgccgcatgcagcttgattttattgctcgcacggaagaagccaagcttgaaaaaaatgcggcaaaatggacgtattatgcagaggagaacggcgatcttgatgggtatgaagaagacgagaacgagcaaactgaagagagtgaagcggcagcactgaagaaacaacctagttttgatgcgcaaattgaggaattaaagcagcaattagataaaaaaagcgatgttgcaccgtaaagccttatagtataatagaggttgtcgaccaacgaaagacgcgaacgaatgtctaccgtcttatagcgtcataaaacgagcccgcctatatttagcaggcgggccattttttagaagggagagcaaagaaatgaaaaagaatcgaacggacattattgcttatatattctttgccttgctggttgctgcccttctagaattggtattaagtgttggaccactcattatgctaatcattgcagcaggctttatttattatgggcaaaagcgaatgagccgcagaaaagggcgtttcgctttttatatcgggatcatcatgtttgtgttcacgttgttctcctctacgttttttatcattacactatacggcttgctcttttattcactttatttgttttggggaaaaatgcgtaaaccgcgacgcgtgaatgtcaacattggcgatcaaccaacgggtgaagctgtgcggcaaaaaaaagcgctgttttttaaaaacttgatctttggcgatcagcgtgctgaagatcaagtttttagcagtgataatattaatattctttcgggcattggtactacgaatgtccattttgaaaataccgtgttgccagtaggagacacgattgtgatcgttcgcgggtttatcggccgtattcagctgtatgtcccttatgatgcaggcgtatctgttgagcattccgctatcttcgggcaaacggttgtatttgaccacgaagaaacgggctttaaccaaaatgtcgtcattaaaaatagccaatatgatgaggcgccgcggaagctgcggatctacacatcccttgtcgcaggagatattgaggtgatttaccgatgaaatcaatgcaaaaggtaggcgtccttacattctgcatcttggctgtttgtgctgggtttattagctggtactttgttacaatcgggctatttcattgggagtcatttgtaaaaattgaccctattttttacaatgttccccctgtattgtggcttgttgctatttttacgttgattgcgatccttgtttacgttgttgctatgctcatttggaagcgggggatgaatgatattcgcggggcattgcaacaattaagtgatggccatatggaaaaagggcgagaacaagctggtcagatgtctgccgattttaaagaggcgagcagtttgattattgacatggaacgacggatgagcaagcaggcagatcgctcacaaaaattgatggaacaatgggctgaaaaagaaagccagttaaaaagcgaaatcgtatcacaagaacgaaataggatcgcccgtgaactccatgattcggtctcgcaacaattgtatgcggcatcgatgctcttatcggcggctgtaaatgggaaaaatcaagatatagaagcactgcaaaaacggtgcgagcaaattgaaaaagtggtgaatgacgcccaaaatgacatgcgcgctttgctattgcaactacggcctatccaattggaagaccaatcctttaaagaaggcgtcgaacagctcgtagacagccttgccgaaaagcatccgctatcattttctgtacggattgccgacgctcccctttcaccaggcattgaggatcagctcttccgtatttcccaagaagcgattgccaacgccttgcggcatgctgaggcaaaagaaattagcttgtactacgacaagtttgaccaatttgcgcttttaaagattacagacgatggggtaggctttgaccgcaaagaacacacaggtggctatggcctaaacagcattgaagaacgagcggaagaaattggcgcgacaacgcggattgttagcgttccaggccagggcacaagcgtcgaggtcaaggtgccgatcgtaaaaggaggagaagaggatgatccaagtgctaatcgttgatgaccatgaaacggtgaggatgggggtttcggcgttcttgtcgacccaggaagacctccatgtcgctggagaggcggccaatggcgaggaaggcgttaagttggcgcttcagttaaagccagatgtcattttaatggatctcgttatggatggaatggacgggatcgaagccaccaaacagatcaaagcaaactggccccaggcaaaaatcgtcgtagtgacaagttttgtggacagtgacaagctccgtcctgtactggaggcaggtgctacgagctacgtgttaaaaacgtctagtgcgatgcaaattgccgaagcgatccgaaaaacatacaatggcgagtcggtgcttgatgccaaagtacaagggcaaatgatctcagcttttaccgccaatgtcccgttacaccaagccctgacaaaacgggaattggaaattttaaagctcatgtcggaagggaagaccaaccaacaaattagtgaagagctttacataacgattaaaacggtaaaaacccatgttagccatatattggccaagttagaagtggaagataggacgcaagctgtgatctatgcgctaaaagaaaaattgttcggctcgtaaagccttgtctactgatgaccaaggctgagcgaaccgttcttttttactagacttcggtgtgtgttctcatgagacagcatcgataagtgaagaagcactagacgataataacaaactgggatgaggctaaccgatcaatggttagctttttgcttttaaccgctgtactgccgccaacaggcaaaacgcgaacacaataatagacgcaacccaataaaaggcgaaaaccatatttcctgattctgttgctatgtagatgcttgttggaatcgttcgtgtgacgccttcgatactgccggcaaacatcatggtagcgccgaactcgccaagtgctcttgcaaggccgagcattccccctgacacgactgttttggaagataagggaaacgttacattccaaaaaacttgccattcgcttgcccccatttgccgggctgcctcttctaagtcgctatcgactgcttcaaagccgttgacgaacgtttgataaattaacgggaacgcgacaacggcagcggctatgacagctgccaaataagtaaagacgatgggctggccaaatagtgattcaaaccatgcgccgataaagctgcggcgcccgaacaaaacaagcagcaaaaagccaatcactgtaggcggcaagacgaggggcagcatcaatgctgtctctaaggcaagcttgcctggaaaacgcctttttttaaggaaagcagctgccacgagcgcagtcacaaaagcaagtgctcccgccactaatacgacacgaacggaaacgaaaatcggtgtccaaaatgcttctgcagccattaggaagctcctaaaaagccgaagtcctcgaagacggcgagtgcttcatctgtttgcagccattcataaaaatggcgagctttttcattgtcgttgatgagcccgactgggtaatagatcggttcgtgtgagtgttcaggagcttctgccacaatcgtcacttgatccgatgtttccgcatccgtttgatagacgaggccagcatcggcattcccggtttcaacataggtaagcacttggcggacatcgctgccaaaaatgaaggattcttcgagttgatcccacattcctaacgtttctaacgattgtttcgcatattgaccggcagggactgtttccgtttgtccgatggcaaggctccgcaattgagcgctcgttaggtcatcccattcgctaaggctgtcggcaacttcaggtgcagctacaaggacgagcttgttttcaagtagattcactgagtcaacaaggttgtcggcattggccacttgttccatatctgcaacagaagccgacagaaacacgtccgctggtgcgccttcattgatttgctgccgcagctttccagacgaaccatagttcatcacaagtgtttcccctgtttgttcttcatacatagactctaattttgttaatgcatccgtcaaactcgctgccgccatcacatgaatcccatcatctgcttccgggcttgttccagaaggggtacagcctgctaaaatcataaataacagcgcacaggcacaagtaggcagttgtcgtttcatcatcgtttctcctatccgctcattcgagtatcctttttgataaaaaggctaaggcaatgcttggcgaaagtcaatccaaacggccttgggaacgatagtaacaaaacgaactaaaacgaatcttatccatataaatttgtaacattcttttatcgagttattgacggtattttcacacacacttaaactaaagataaaattgaatattttccataaaaagtaaataaaaaggtggctaaaggaatatgaacgtaaagaggtgtgaggaggtgcactattttgtattgttccgtaaaaggggagggaaaacgatagagctgaacggctgtttaaggccaagtgtttaaaatggtgtggaacatttctttatgacaatgctgctggccgctagattattcgtacaagtttgaaagcggtgccaaatggcggcgatttcatccattattgataaagtgaggctgaaaaacatggaacgagaagtaaaagtgtatacagatttacaacgaggaacgattagcaagcatatttatggccatttttcagagcatttaggccgttgtatttacgaaggcctctgggttggtgaggacgcctccatcccaaatacagacggaattcgcactgatgtgcttgaagccttgaaagagctcaatattccggtgttgcggtggcctgggggatgctttgccgatgaataccattggaaggacggcatcggcccaagagaaagccgcaaacggatggtcaacacccattggggcggtgtcattgaaaacaatcactttggcacccatgaatttttgcggttgtgtgaactgctcggggctgaaccttatatttgcggaaatgttggcagcggaacggtccaagaaatgcaagaatgggttgaatacatgacatttgacggcgaatcgccaatggcaaattggcgtgcagagaatggcaaaaaggagccgtggcgtttaacgtactttggcgttggaaacgaaaactggggctgtggcggtcatatgagagccgaatattacgctgacctttatcgtcgttatcaaacgtatgttaggaattacggcaacaacaagctttataaaattgccggtggagccaatgttgacgattaccactggacggaagtgttaatgcgggaagcgagccagttaatggacgggttaagcttgcattactatacggtgccaggtgataactggaatgaaaaaggcgcagccttagataagcatgagtcgcaatggtttaaaacattgaaaaaagcctttcgtatggatgatttgctgacgaggcactcagcaatcatggatcaatacgaccccgaaaagcgcgtaggcttaatcgtagatgaatggggaacgtggttcgatgtagaaccagggacaaatccaggttttttataccagcaaaacacgattcgtgatgcgttggtggcgggcgtccatttccacatcttccacgagcataacgaccgcgtccacatggcaaatatcgcgcaaatggtcaatgtgctccaagcgatggttttaaccgaaggagagcgaatgctacgcacgccaacttaccatgtgtttcatatgtataaagtccatcaagatgcgacgaggctagaagtcaaaacagatgccggtttgtatcgctacgatgagcaagagctgccagccattacagctacagcctcaaaagatagcaacggagccattcatattagtatttgccaccttgatccaaaccatgctgcatcactagcgctcaaacttgaaggaatagagaagccgctgtctgctgctaacgtttctggcgaactgctaacagcaaatgagttaaatgcgcataacacatttgaacaaccgaataaagtcgagcctgtggcgtatgggccgacatctgtcagtggacaggaactgaagctagatgttcctccttcttctgttttgcgattaacaatcaggccgtaaatctttataaatcagggcttccgataaagggaagccctgatttgtaaaaaaggctatgaacatgcatgaaagggggagccaatgatgaataaaccgccttgtaaaggctgtatggcaagtgtgcgattaaccgcaagtgaattggagcggcttattgtagaatatggcgagcaggaaaacgagcctttggccacaacagcggagtatttccggcgcctcagccaatgcggccaatgttcagcgttagtgtgcgaaacaacgtgctggcatagtggaatgttgatccagtacgttgccaggcttcaaaacaaaggttgtccccatccagacggcgggaaatggtaagtcttcacgttcaatatgaaacttcgtgatactaaatgcgaagtcagaaacgaaacggtgccgaccaatttatttgaggaggactgcaagtgagaatgggcaaacagcgattgttcagtagcttgctagcgtttatgttcatcttggcgattgccactcctgcacaagcaggtgacagccgacagaaccaggcgtttcacaaacaacgactaataagcggtgcaccgacgtttacagaagcgtctgtccatgacccttccgtcattcaagcagacgggatgtattatgtatttggttctcatttggcttcagcgaaaacaagtgatttactgaattggcagcaaatctccactcatgttcacaatggcaatccgttaatcccaaatgtttatgaggaactagcagaagcatttgaatgggcaaacagcgatacgctctgggcggccgatgtgatccagcttgaagatgggcgttattatatgtattacaatgcgtgccaaggggacgccccaaggtctgccttaggggttgccgtggccgatgacattgaagggccttataaaaatttgggcgtgtttttgaagtcaggaatgtggggagaagaaagcccagacggaaccatttacgatgccaatgttcacccaaatgcgattgacccccacacgttcttcgatcatgaagggaagctttggatggtctatggctcttactcaggggggatttttattttggaaatggacgcggacacgggatttccgctgcctgggcaagggtatggcactcacttaacaggcgggaaccatagccggattgaggccccttacatccattatgaccacacaactggctattattatttgtatttgacttttggcgggctagatgcaacgggtggctataatatgcgtgtagcacgagcaaaacagccgacggggccttatgtcgatgcagaagggcgtttcatgagcgacgcgaaaggggcaccaggcacattttttgatgatgcttcgattgagccatttggcgccaaacaaatgggcaatttcttctttaaacgtgagccaggtgaaataggttcaagtttgggaacaggctacgtttcccctgggcacaattctgttttctatgatgaagaaaaaggaaaggtctttctctttttccatacccgtttccctgggcggggagaaatacacgaaattcgtgtacaccaaatggtgatgaatgaaaaaggttggccagtcatagctccttaccgttatacaggggaatcattggctaaagtagaagacgaagacgtagttggtgactacaagttcattaatcatggcaaggagatcacggctgacatcaaggagtccacaatcatccgtttagagacgaacaagcaactttcaggcgctgtgacaggaacgtgggaaaaaacaggcgattacgatgtagagttgcgaatcaatggcgccacctataacggcgttttcatccgccaatgggacccagtgtccaataggggaacgcagacctttacggccttatctgatgaaggtgtcgcgatttggggcagtcaaatcgaaagagatcgttgattctcttgcatgacttcataccggaacgcatcgagctgtacgacacctaagtgctcgaaaaacctgttgctgtcgcttaaatctaggacttacctagagttaagcgacagcgtttttgtgatccgcttttcgatttctacgacagtgaacacaaacaaacccattaaaattggaatcgcccactgcccgacggttagtggcgttgtttggaagaccgtattcataaacggaatgtacgttaaggcaagctgcaatagaagcaagagaaaggcgacaccgaatgcaactttgttttgaaagaagctgcgattgaaggcaaagtccaattcgctgcggcagttaaacatgtaaaaaagttgcgccatgacaaacatttgcaaaataatcgtttgtagcgtgctgccttcgtagcctctcgtttgcataaaatgattcatccaaagcgtgccaatgccaatcatagccgaaacggctgtaatccggaaaagataatagggggaaagcaactttgcttttcgatctcgaggcgggcgttgcatagcgcctcgttctagttgttcaaaagcaaggccaagggaaacggtaatagcgacaaccatattgacccaaaggatttgtacaggggtaagcggcatcgacataccgagaaaaatgctcgcgacaattaaaatcccccctgctccattcgtcggcaaaatgaagagaatcgtttttttgacattgtcgtagacgcggcgtccttcttcaacagcatgcacaatcgtttggaaattgtcgtcggcaagaaccatctttgctgcatcctttgtcacttctgtgcctttgatgcccatcgctaccccaatatcagcccgctttaaggcagcagcatcattgacgccgtctcctgtcattgcgcaaatatgcccttgcttttgcagcgatttgacaagccgtaatttattctccgggcttgtccgcgcaaatatgtgggtgttcgtagccgcttcgtctagttcttcatcactcatttgatccaactctttgcctgtaagggcttttgcctcgtcgccgatgccaagctgtttgccgattgctttggccgtgtctccatggtcacctgtgatcattttgacttgaatgcctgcttttttacatgcctggacggcggctattgcttcttctcttggcggatcgacaataccggccaaacctaaaaacgtcactcctttagctaaatcatgatggccgatggagtctacctgagcaggcatttctttgtatcctgcagcaagtacgcgctcgccagaattggcacgggcagacatttgtttttcccaatgaacccggtcaaacggaacgtcgctgttttgttcggccatggcgaaaatttgatcaggagcgccttttacaaagagcacgcgcttgccgtttgtttctgctaatacggccatatatttgtactcagaatcaaaggggattttcgaaacaactgtataacgaggcaagtccaatgtcgttttacgtacaagtgttaaaaaacacccgtccgttgggtcgccgtcaattgtccactgcccatcgtcgtcttgacgcaaactggcatcgttgcatgtttggacgcaagcaagaaagcgctctagcacagggctcgcttcattgcctgtctcagcgttagggacaatctcgccttcaggggcgtagcccgttcctgtcaccgagtaactgcctgctgtcgtttctacggttgttaccgtcatttcattttttgttaacgtccccgtcttatcagaacagatgacagacacagagcctagcgtttcaacagaaggaaggctgcgtataatcgcgtttcgtctagccatccgtttgacgccgatagctagaatgattgataaaatcgcaggcaatccctctggaatcgcggcgactgccaaggcaatgaccgataaaagcaattccccagcagcaaagccgcggaataggtagccgaataaaaacatgacgacggcgatgccaacgacaaaaagagcaattgtttttccaaacgcggcgatttggcgcaagagcggtgtctgtgtgtattcaacagcagccattgcttcattgatttttccgagctccgttgccgggccagtcgccgtgacaatgccgacgccacttcccgcggcgacggacgtgcccgagaataccatattggtgcggtcgtttaacacagtatctgtatcaagaacatccgtttgtttatcaacagccgtcgattcgcctgtgagcgccgactcctcaacacgaaggttgtgtgcttctattaaacggatatcggctggcactttatcgccagcgcttaagacaacgacatcgccgacaacgacttccgccgcttccatttcaaggcgctcgccgttgcggcggacgttcgcgcttaagctaagcatcgctttaatgccagatagcgctttttccgcttggctctcttgaatatagccaataaaagcattaatgatcgtaacaaggagaatgacgcttgtatcgatgtaatggccaagcaaagcagtaataagggcggcggcaagaagaacataaattaacacatcgttaaaatgcaggataaactttttcagttctgagtctttctttctctctggcaattcattgcgtccattttcatgcaagcgccgatttgcttcttttgtttctaacccagtcgtttgatttgtatgtaacgcactttctacattgtcaattgtcgtcgcatgccattgattctccattcgcttcacctccctagtattatgtaacggctgtcttttttcatgcatgagcaggtaggacaaaaacgcgtttggcaatgagttggatccaacttatagactattggactttttcttatcggataaacgatttttccttataatagacaaaacggtatggggaggaaaagcgatgattcgattgttaacacaagacgataaagcacattgtttaacatttttaaaacagcaagcggccgaaaacttatttatcattggcgatatagaggcgtttggctttgaaaccgatttccagcgtctgtggggggaatttgatgaaacaggcaagctaaacgcggttttgctaaaatactatgaatcgtacattccttatgggaaagagccgtttgcggcagaagctttcgcaaacattatgatcaatgacgactcgtttaaacggatgtctgggttgaaatctgtttgtgaggaagtggcaacttatttgcctgcgtataaacaaaaacggcaaatgtattatgcgaaatgcacccgtgtcgaatacaacgaagcggatattccggttaaactggaaaaagcgacgcctgacgatgcagaagccttacaaacatttttagatcaaattcctgagtttgctgactctttgcctacgaatgtagagacaaagcgccaacatttacaaactggttttgcaagagcgatttatgtgaaagaccaagggaagatcgtctctagcgcatcaacgactgcggaaaattccgcttcagccatgattgttggcgtggcaacattaaagacgcacaaacaaaaaggctttgcgagtgcttgcgttgccaggctttgtagcgacttgatcgctgaaggcaaggagccgtgcttgttctatgacaatccagctgcaggcgctatctataagcgaattggtttttctgacattggcttgtggatgatgtatgcttattgaacacagggagatgccgataaaaaggctcgttaacggaacatgcagcgaagcgctgcattcgaaacagtgctatgtcaaaagcactgttttttatgattgtccaaactaggcgcttgttttccgcaattttgtcggatttcaataatggcgctcgagatttgtagatggtattatatagggatgtgaagactataaatatagcgcactgacaaacaggccagaacattgttttaaagcttggctgacgcgtttttgctaaaagtgcagctaatttaccatcaaggagtacaagctatgaaggctgtttttcaattgctgaaagagcaatacgacaacaaacatcttattttccgcctcgctgcatttgagcagaggagcaagttccagcttcattacttaggggcgctctggcaactgtttagcccactcatgcaagtcgttgtctttttcgtgatctttggtttagggattcgccaagggaaagatgtgggggacacgccgttttttgtttggcttttatgcggtttaatcccatggttttttattagtcctactgtactgcaagcgtcaaatagcatacacaaaaaaatcaatatggtgtcaaaaatgaagtttcctgtcagcgtgctgccgtcaattgttattgtcggtaattcgattagcttttttgtcatgcttggcgttcttggcattgtgttggtgatttactcggttttttcgggtgcttatttgttgcagctgccttattacttgttgtgcttatacgcgttcctatatgtatttaccttgtttagtgctacgatagcgacggtcatccgtgattactataattttttacaagcaggcatgcggatgctgtttttcttgtcgccaattgtctgggtgccggcgtcgatgccagagaagttgttggcaattttgcagatgaatccattttattacattatgacagggttccgggacacctttatcggtgggcgctggttttatgaagatttgacgtatatggcctttttctggtctggaattttgttaattggcttcatcggttcccatgtgttctataaatttaaaaacagctttgtcgactatttataaagggggcaggcaaatatgaacccgaaaatgatattaacgggcgtatcgaagaaatatacgctttatcggaacaacaccgagaagttaaaggcgatgttctttccgaaaacccgtgagcagcaccgtgacttctatgccctcaaagatataaaccttgaagtctatgaaggcgagacaatcggtgtcatcggcataaatgggtcaggaaaatcgacgatatccaacattttagctagcgtcatcccgccaacggaaggcgaaatgacggtgaatggtgaaacatcattgatcgccattaatgtcggcttaaacaaaaatttgaatggctacgaaaacattgagcaaaaatgtttaatgcatggttttagcaaaaaagaaattgaacagctgatgccagcaatcgaagaatttgccgatattggcgattttattgaccagccagttaaaagttattcgtcagggatgaaatcccgtttagggtttgccatttctgcccatacaaaccccgatatattaattgttgatgaagcattgtcagttggcgacaaaacgttttaccaaaaatgcaaagacaaaattgatgagtttaaagcgcaaaacaaaacgatcgtgttcattagccacaatataaaagagatcaaaaatctctctgaccgggtgttatggcttcataatggcgaagtccgggagttcggcgacaaaaacgaagtcattaaacagtacgaagactacattaactggtttaataagctctccaaagaagaaaaagaagcgcacaagcaagaattgaaagaaatgcgctcccttgccccatccttatacgaggagcaagaaaacggaaaagcaggttctggcggcgatggaacacaaccaattgtacagccaaagagggacaaacaagcagtcaagagcgctgtttggttttttagccagcttgtcgtgttcgcagtcatctttttaactgctgcttattttcttgtggtgcctcaactgacggatggttcaggcagtgaggagttggaacaagtagcggttggcgctgaagtacacgcagggagcaatattggcaaaatcgacgattccaatagaagtctatgatcttgtgctcacacacgccatccttttactagaacgaagttgtcaataatggcacgactacagcctggacactatatttagtgttataatgtgagttgtaatctaaatatggggtggtagtgacgtgaatagcaacgaatttcaaaactgggtagcgaactattatgagaaacgaggctgggccgatttaggaatctttattcgcatggggtttttgtcggaagagacaggagagcttgcccgtgcaatccgagcgctggaaattggccgtgacaggccagatgaaacagttgccaccatggaagagaaccgccgccagcttgctgaggaattaggggatgtgcttggcaatattagcatgattgccagccattacgaccttacgttggaagatgtattcgcggctcatcaaaaaaagctaagcagacgctacgcgcaaagtttgtaacaaaaaaaggagggggcccctcctttttttcgtacagataaagtccttgctagcggtccactgcagcttcaatgagcaatataatggcggtaatgacatggaagagccagcccagaaacgggatccagccaatcaccgatgtcgctatgccaaagatatgccctgctttgccacggttcgaggcaacggccaacagaaggccgacaatatgaaagacaagcatgaaccataaaggcgagtaacctgacaataggataaacagtccaccaaaaaaggggatggccaaaaggccttcaaataccccgccaagacctttcattacacggcttaccatacgttcacctcatcacgtaattgttccactggtagtatagcacgttattcaacaaacgactcactagatttacgattcgcctattcgcttttaacgttcgcatttagtaaaatgaaaaaagatcgttatttattaggaaggaagaggctttcatggaatcttcagcacaacaatttttacatcagttgctatccacgccctccccgtcaggactagaagcagaaattcaaaagaaatggcttacctacgttgcgccatttgctgatgcgtgttatacggacgaagctggaaatgcaattgccgcgctgaaccctggggcgccatttaatgtcctgctggcagggcattgcgatgaaattggcttcttagtcaaagcgattgatgaaaatggttttgtatacgttgaaaaactagggggaattagccataaaccagcacttggcatggaagtgacgatacttggcagcaatggcaacgtcacgggcgtgtttggcaccaatgcagaacaccatggcggcgcgggcgataacttttcattcgatgaccttttcattgattgcggggctacttcggctgaagaaataaaagcctatgtacaaattggcgattatgccgtttatagccatggagcaatcgatttgcttggcgaccgattaagcgcaagggggttggataaccggagcggtgcctttatggttgccgaaatattgcggcgcctccaacaaaaacgccctcaggtcggcgtgtatgctgtcagcacagttaatgaggaaaccaatttgggcggtgcttacttcgccgcagcagggattaagcctaatctcgccatcgcccttgacgtcacttttgcgacggactatccgacagtgaatgccaaaaaatacggcgatgtgaaagtcggcggcgggccagtgttggcaaaaggagcgcccattaatcgcaacatcaatgcgctgcttgaacgtacagccaaaaaggcaggcattgatgtccaatacgagctgacccctagaaacacaggcaccgatgctgaccgcatgcgcttgacaggcgagggcgtgccgattgcgctcgtatcattgccactccggtatatgcacgctccccgtgaagtcgtttcgaaacaagatatggaacaagaaattgagttgctggttcagtttattgcaaacttaacgggcaaagaagaactgcgcccagtcgtttggccggcaacctagcaaaaaaagaggcgttcgcctcttttttggtttttgctaaaacgaatggcgctttttctgtttgtgccagtaaacgtacatagcaagtggccaccataaaacggcaaaaatcacaaacaccgcccaaggggtaaggggtgttgtcaacacattgacggctacgaaaaacacaatgagcaaggcagagccagccagtgagaaggcgaatggttttttgtagagagcgatggacatcggccaccaaataagagcaaagatcgggtaaatggtccaaatggcttcaggtgtcgtgatccagttcatagcaatgaaaaaaacagatgaaaggagcgttcccaggaccccgtaagcaagcgggcggcgggcaacacctatagacaaaggccaccataggaggatgaaagccgggaaaatagcccacggaaagccggtttcccaaaacatattaaggagaatgtaatataggatcatggaacttgacgcaatgccagcgaaaaagagcgagcggctcgcttggccaaaaaaggcggaaaggggccaccataataatgggaaacaaatatacaagatccaaggataatcgggcgtctgtacccaattgacaaaacttaaataaacgatgaatgcagtcgccattgtgaaggcataaagcttataacccagttttctatctagcataatgctgagcgagcttaataacagtagtccggctggatacagggcccaccaatctccaggggtggtcaagaaattaataagaaacagaacgccaataaacacatgagccgccaaattaaaaagaacgatcattggtgcccgcctttctgtttgcgccaatggaaaaagagtgagagcggccaccacagcacggcaaacgtagggtaaacgaaccagatgacagtaggggtatagtaataattaatgaaagcgaacagtgcaataagcaaggcgcttccccacaaagagaattcaagatttaagcgcgctcgcgacttttttagccaatgtggagccggtttgctttcttcttcctgaaaggcttgctcgatttcggaaatatcgccaaactccacaatcgctttattgatggcatcttcttgtgattttccttcccgaatgaggtcgtcgactttttcttctagattttcgataatttcttctttcattaacaaagtttcctcgttttctggcacatcgcggaataaatggtcaacgtggttgcggattgttttcatcactaaactcccttcaaaaataggtcaatgactgactttagttcattccattccaccgttatttcgcgcaaatacgctttgcctaacgttgttatggaataatatttgcgcttgcctccatgagagcgggcgccataataagatacaatcaattcttttttctccagccgttggaagacggcgtaaagcgtagcttcttttacttcaaagcggccatcggttttacgggcgatctcttttgaaatttcgtagccgtaactatccttcgttgctaataggctaagcacgattgagtcgatatggcccctcaatacatcactgcgcatttagttggatcacctctttttagcgaatcaataaaaatgaaaattactcttcttcatagagtactatctgatggagtaatcgtactattaattgctctgtctgtcaaagtaattttttataaagaaaaacttttttataggcacttttatattttcacttgaaaaagcgcttacaaaacgttagaatgcaattaagtttactactaaatcggtttagtaaaggaggaattgaatggccagcgtcacaatggcagacgtagcaaagcttgcaggtgtatcaaaaagcaccgtatcgcaatttctcaacaaacgctaccactatatgagcgaagaaacaaagagccgaatcgaacaggcgattcatgagttaggctatagcccaaatgcggtggcgagaagtttgcggcagaaaaaaacgcaaacgattggcgtcattgtcgccaatatactccatagtttttctactgaagtgattcgtgcgattgaagatacatgtcatgcctatgatgtccatgtcattgtctgcaatgcagataacgacccccagaaagagaaaaagtacgtggagatgttgcgggcaaagcaagttgatgggttgatcgtttttcctacaagcgacaataaggagttatttaatggactcgtcgctgctcattttcctcttgtatttatcgatagactcattcacggtgtccctgtaaatgctgtgcttgccgataatgaagaagcgatgcgtttggcagtccatgcattagcagaaagtggtcgccgccgaattggtttagtgctcccaccgcttttagaggaaattaccccgcgaatggaacggcgggacggctttatgaaggcaattagtgaagcagggctcgaatatgaggaagcgtatgttgcggcgggggaagtagaggaagccccccattttcttgccgacatgctggcactgccaactccgcctgaagccgttattgccggaaatgatctagttttgtatgaattgctgcgctcgatcaaacaacaaaaaatcgatgttcctgaacaaattgcactaattgggattgacgatgtgacgtttgctgacttttttaatccatccattacgactgtagctcagccgacatttgcgatgggccataaagctgctgagctactgctggaagaaatcaatggaggcaagaaacgttcagaaattcgcactcaccgctttcagccaaccttaaagtgcaggcaatcttgctaatgaaggagagtgggcatttgtgagaaaacagctgtttttgttggcgacagccaccttattgcttagtggctgtggagccgtaaaagagacggcggacaacgatccaggtgatccgaaaaagctcattttggcgacgcaactagatgcgaatagcccatacgcagtcggttttgaagcgtttaaagaagcagttgaggaaaagacgggaggcgctgtgactgcagaacttcatacaaatggctcgctaggcggcaatgaggatatgctgttgcagagcattgccacaggcggggttgatatggctgtaatttcgcctgggtttatgacacaagtattgcgtgaagtcgacttattttcgctgccgtatttgttcacgagctatgaacattgggagcgcgttgttgacggcgagattggcgtagaaatgagcgagttgattgaaagggacacaaacttgcaagtgctcggctattggacagcgggagtacgacaatactatgggccagcaccacttgctcatatagacgatttgcgtaatgttagcattcgaacgcaagactcgcctgcaatccaggatagttggacagcattaggggcactgccgacaagtgtggcctgggatgagatgtaccaagcattgcaaaaccgggttgtcgatgcctcggaaaatgattttacaaatatttatcaatcgagccatcatgaagtgacgccttacttgacgttaacgaaccatgattatacgacacgtttctttttaacatcggacattgtaatggaacgcttctctaaagaagagcaacaggcgatctatgaagcggcagaggaagcgactgttgctgcccgccaagcagataaggaactggcgaaacaatcccttgaacggctggaggaggagggggcaattgtccaggaaattgacaccgacccatttattgaacagacagaagaagtaagagagaaagcagcagcgcaattaggcgcgaccgaactttatgaaagaatccgctccttggcggattagaaggagggcgcaaatcatgaaggcgtttttaaatagtctagaatgggtgctgatgcgtgctgcggcggtgttctttgtcggctttgtcgtgtgcatatttttacagctgctatcgcgttacgtaccggggatcacgattttatgggcagcggaaattgctacatatgcatttatttggacggtatttttaggtgctgctgtcatggtccgccatcaagaacattttaaaattgattatttgtatgaaaaacttgccggcttgccgttgcttttaaccaaattggtcagccacgtgttgattggtgctttcggtgctgctatggtcgtttacggctctaagctgacgcacttgttttgggagtggacagtaaacacgctgccggagctacagcaaggatacttgtggcttgtccttcctgtatctggatttgcgatgttggcctttgccattggcaatgctgtggaagacattggcgcccattctttaaaaaaggaaagtgatgcggcatgatcggcctctttttagtgctgttgtttattgtgctcttgtttttaggggtacccattgcgtttacgcttgggattgtcgcttttgtaggcatctggcttctcgatgtcatgccgttgcaaattgttgtacagacgatgtttgctggtgtggaatcgtttattctactggcagtgcctctctttattttagcggcaaacattatgaaccaagggcaaatttcagagcgtttaatccaattggcggtttcaatggtcggccacattcgcggcggtctcgctcaagctaatattgtggtgtcgatgttttttggcggcatctctggttctgcacaggcagacacagctggcatcggaaaaattttgattccaagcatgatgaaggaaggctatagcaagtcaaccgccgtcggtacaacagcggcatcttccacaatgggcttgctgattccgccaagcatcccaatggtcgtgtatggcagtgtgacaagtgtttctgtcgggcaaatgtttatcggcggcattattcctggccttttaatgggcgtggcgatgatggctcttgttgccttcgtttctcataggcaaaactatccccgccatgagcgtgttaaactcgctgaaattggccggcaatttctaaagtgcgtgccgcctttattgacgcctttgattattttagggggaatcgtcggtgggtttgttacgccgacagaagcggccattattgcctgcttgtatgcgctcattttagcgatgttcgtctacaaaaccattaaatggaaggacatgccggaaattatatttgatacgatccgtctaagttctcttacgttgtttgcgttggcgacagcaagcgctcttgggcggttatttagctactaccgtgtacctgatgcgattgccggattttttgattcgacattttcaagtgctggcctgttcttgcttgctgtcattttattgtttctctttgtcggcatgtttttagatgccattccagcaatgattttgtttgtgccaatcgtccttccagcgtcacaaacacttggtatcgatccgattcattttgggattgtcatcgtgatgtgcttggccgttggcatgattacgccgccttatggcctatgtatgctgttggcaagttcaatagcgaaattgtctgttagccgttcagtagttgctttattgccttatgtagcggtcatccttgtggcgattttaattgttgcgtttgtgccggctgtggcgttatggctgccaagtttattaaatgaatactaggaggaagaacaaatggactcatttaaagagacggcccaagcatgcgtagaggaaataagtacggttatttcctgcacaaaggaagaagagctggcggcgattgcccaagggtttaaacacgcacggcgcatctttattagcggcgacggccggtctggcctaatgggcaaagcaattgctatgcgtttaatgcatggaggctacgaggtgtacgtcgtcggcgaaacgattacaccaagcattggtaaaggcgatgtcctgcttctcgtttctggctcggcctcaggagtcgcagctaggcaggttataaaaaaagcaaagcaagctggcgccaaggtgatgcttgtaaccgcaaaccgggaaacagaattcggcgatctttgcgaaacatgtttgtttgtaccggcagcaacaaaacagcgaaagcccgacgaaccaaaaacgattcagcctttaggtaaccaatttgaccaaagcatccatctgttattagatgccattgttgtcaagctcacaaaagaaaaacaggcagaaatgaaagcgcgtcacgccaatttggaataggaggggagcgtcttatttggatcagctgaaaagaatggcggcggaagctgctgcagagtatgtgaaagatggcatgaagatcgggctaggttctggttcaacggtgtttgaatttgtccgtgtgttaggagaaaaagcaaaagaagggctgaacatacaagctgtggcggcctcacggaaaacggaagcacttgctaaagcatgtggcatacacatcatcgattttccaacaaaggaaaagctagaggtcgcttttgacggagctgatgaaattgcccctggcctcatgctattaaaagggggcggcgggtcgcttttacgagaaaagctggtagctgcagcggcgaagcgcctcgtcgtacttgctgatgaaagcaagcttgtagaggagttgggcgctttcaaactgccagtcgagatcattccgtttgggtgggaaacaacagccctgcggattgaagcgctaggcggtgtagcgagtttgcggcaaacgggcaaaagcccatttgtttcagataaccataattggatacttgactgtgattttggcaacattcgcgatccttatagcttgcatgaaaaggtgaaaaaacttgttggcgtcgtagaaacaggcctatttttggacatggcttgcgaagccattgtagcaagcaaaaacggtatccatcatataacaaaaggagacgaattcaatgtttgatgtcattacactaggagatgcaatgatctcttttagcccaaatgcgactgggccactaaaatttgtccactcgttcgagcgccgtgtcggcggagctgaattaaatgtggcaattggctgttcacgactaggcttaaaaacaggctggattagccggcttgggaaagatgaatttggccagcatattcaaacatttgcccgaggcgaaggggtagacgtcagcgaaacgaaattagtcgacggctatgccacatcgcttaactttaaagaaatcatggcaaacggagcgggacgcactctttattatcgcaatccgtcgccaacagagacattaaagcctgaggatttaaacccgagctatttccaacaagcgaaaattctccatttaacagggatttacccagcagttgccactggcaatatggcagtgacaaagcaagcaatcaagcttgccaaagaaaatggcgtaaaagttgcgtttgaccccaatattcgcctgcgcctttggagcaaagaggaagcgcgacttgctctgtacccgcttttgcaagaagttgacattctcctcacaggcgatgaagagatggagattattctcggaacaagcgacccaactgagattatcgctgaaacgacgaagcttgggatagacttagtagcaattaaacgaggagagaatggctcggtcggcagttatcaaggcaaagtcgtcgaggcagcaccagtgcaggcgacaaaagtcgtcgacacagttggcgctggagacggctttgatgctggactgttgtatgggtatctccaaggttggcctcttgaacggatgctggcatttgctaacacaataggttcgatggtcgtcagcattgtcggggacaacgaaggcttgccttatttagaagaagtgcaagcgcagctcggcgagcttgaacgaattgaacgctagtattgaggaaaggggaatcgacatgaagttgcagcttgcgctcgaccgccttgattgggaaacgtgttttgcgctagtggaagatacaagtgacgctattgatataattgaaataggcactggcgttatcaaagaatacggcatggaaattgtaaggcaaatgcgcaaagcgttcccccgccacacgctgcttgctgacatgaaaatttgcgatgccgggaaacacgaggcacgacaagcgtttgcagcaggcgccgatatcgcaacggtcatggcattcgctccagctgccaccattgcggagacgctttcagtagccagccaagaaggcaaagaaatgatggttgacctccttggcgttgacaaaaccgagcaagtgaaggcattgaaagaacaaggcgtttcatttgtcgggcttcatctcggcaaggacgaacagcagcataaacagcttggacaagggctgtttcagttagtcgaaggaactggactaaaaacggctattgccggtggtgttacggttgaatcgttgccagtgattctcccataccggccagacgtcatcattgtcggcagcggggtcactaaagccgaaaagccaaaggaagcggcgatgcacatcaaaaaacgaatagcgtcatcggggtaacgttcttcttgacgattggattggcgttacgtgcacacaatagctggatttctttctaggatgttaagagccgctttacacatcgttcccattgttgaacgagtgtaggcggctttgtttaacaaatcagcatgatttgcaatgccgatatcagctaacgcttcttgaaaatagccgagttctgcttgatggctagttgggcaatctgcagctaatatcagatggcagcgggcaaacgtggcaatgatccaaaaaatggcctcacggtggtggccttcgtcaatcagtttttctgtgccatctactgccagtgggcgtgcttctagtgaaatgtcagagctaaaaaagaaagctgtttttttcagctttaccgtcatgtcaaacgtatgggccagtgccgttaaatggcgcttggcctgtttggcatccatgtgttggcaacctaattggtgaagcaaatgctcatatacgtcctccagttggtaagacgtgagcacatcttttgccgctaagtaacgaagccgtacagtagggttgcgtaaggcggcgacaagaaaaagatgggcgacgacaccagtcgggaaaagccagttcatgacaagctcgtgaaacggtttttcaacgtgaagttgttctagccctctctccgattttgaacggacatcggcaaggcggcgcttgacccattgttcttggcaaaagtggcgtgcgacttccttttgcaaaggcttgagaaacccttcttggtcaacaataatcgtgtcgttctgaaaggcatgggcgatatggtagtgtgacagaacggcttcagccgatgacagcgccttttcaggaataaaagaaacttctagtaaaacgcctttatagcgaaatttgccgatttttaaaggaggctcctcaaaagacgtgacgaccatgatgtctaaatctgagtgaggcgccaagtacgaattatctgcctgttcagcggcggaaccactaaaataagctcctttgaaccacttttttccctcggcatacgcccatacccattcatgagcaatttccttggctttccataccttcatcaagcattcctccctttctgactgctatgcttcgcgagaaagtcattttttcctctatgagagttaaaacatactctccccggcggcatgtaagttgttgtttgcgacagtcacacattctatatgcctcttcattcgcctccctttatttttaaaatagaataacattttaatgataattattatcataagaaaatctttataattatatgttatacttagtttgtaacgaatatagagctgtttttaaggacttaaatgaaatagagaaaacgatattcattctcaattagttaaaataattgaaaagagaggggattacaatggctgccactacagagagacttgtgatcaacaaccggaggaaccggtttgggaaatggaaggaccatgctgaactacttgcagcacttgtatcaggtgtgctgatcgttgttggctggctccttgacagctacggtctggccgctgctgctattcctgtatattgcggcgcttttatgatcggcggttatgctaaggcaaggggaggcatgggagagacgttttaaaacaaacaattaaacgtggaaatgttgatggtattcgcagcggttggcgcagctataatcggttactgggccgaaggagcgatcttgatttttattttcgctttaagcggtgctctagagacgtatacaatggacaaaagccataaagaaatttcggcgttgatgaaattgcagccagaggaagctgtcctgcttgaaagcggccaagaaacgattgtgccagccgcgaagttgcgaattggcgattcgattttaattcggccaggggaacgtgtaccagcggacggaaacatcatagaaggaatgactgctttaaatgaagcggctattacaggggaagcaatccctgttacgaaagcagtcgggcaagaggtgtttgctggaacattgaatgtgcaaggctcggtggtcgtaatgataaccaaaccgatggaagaaacaatggttcaaaaaattattcgcatggtacagacggcgaaagaagaaaaatcgccttcgcaactatttattgagcgctttgaaggactctatgtgaaagtggtgttaatcgcagtggcgcttgtggcgctgttgccacccttgctatttgactggacttggctgaatgcatggtatcgagcaatgattttgcttgtggttgcctcgccttgtgcgctcgtcgcttctattatgccagcggttttatcggcgatttcggctaatgcgaaacggggcattttgtttaaaggcggtgtccatgtggagcatgccggcaaaatcaaagcaattgcatttgataaaacaggaacgttgacaaaagggaaaccagaagtatgtgattttattttacgagaaggcgctaataaagatgatgtcctccttcatgcggcttcaatcgagcaccattctacccacccgttggcagaagcaattgttgcttatgcgaaggaaaagggcagtacgaggctgttaaatcccatccaagtgcaagatacgcctggagctggcgtgaaaggccgatttgatgatggagaatggcgggtaggccaggctgcatttgtaggtgagcaggaagcagaacattttcaaaatggcgtagcgaagaagctagcggctgaaggaaaaacggttgtgttcattcaagacactaacggcattgtcggtgtgctggcgctcagggatgaaatccgcccagaaacgcttgctgccatgaaagcattacaaaaacagggaattcaacttgtgatgttgacaggtgatggagaggaaacggcgcaggcaattgcagaacaaagcggggtggaccgttatgtgtcccgttgtatgccagacaagaaagcggaggaaattaaacgtatacgtcaagaaataggaactgttgctatggtaggggacggcattaacgatgcccctgctttagcagcggctgatttaggagtcgcgatgggcggcggcagcgatgtagcgttagaaacagctgatatggtcttaatgaagaatgaattgcccaacatcgctgacgccatcaagcggtcaaaaaaaatgaaccgtattgtgaagcaaaacattgttttttcgattgccgttgtccttttgctcgtgctttccaactttatgcaagtgttggatttgccactcggtgtcatcggccacgaaggaagtacgattttagttattttaaatgggcttcgtttgctaaacgggtaaaggcggctgagttttaagctgaaaagaagaggtcgtattgggagggaaaagccggttcgcatagagaaccggcttttgtgatgacgatgtacgcatccaaacgttgcacaatttgtgcccgtaaagttgtgatgaaagcgcatactttttaggttgcaacgatgatagaatggacgttgaaaggaggggctgcattgacacttaatggtcgaagccagcaaatactcaatgaaatcgcaagcaatcgccgagtcacaagcgcaacgatcgccaagaaatacggacttacccgcaggcagatcagctacgcgattgaaaaaatcaatgagtggctgcaaagggagcatatccctgaaatcgagcggacaaggcaaggccattttattgttgatcaatccgttttttcaaagattacggggaaacaagattgcctgcattcaaatggacaagggtttttaaccgaggagcagcgcgtccactttattttattaatgctgttagcaaaaaaggaagagctgtcactgctccattttcattcccagttaggttacagcaaaaacaccattttaaatgacttgaaaaaagtgcaggagtttgtaacgccattccaattggtggttcgctattcgcggaaatacggttacttgttggaaggcaaagaactgcaaatccgcaaattgctgattcacttaacggaagtggtcgtgcaaacacagacaggcagacggcaacttgaaatcggtacagacattggaaaacatgaaatcagcgaagtccatgcctgcattgaaaaagtcgaacagaagctaggcatccaatttacagatgaaaaactgatggcaatgccttatattttaacgctcgttttaaagcgaattagcatcggacatgtgttgccgccgtttccaatcgaatacgatgaactctcagatacgaaagagtaccaggctacagaggaaattttccgccatctaaaagacgtgccaaagcaggagcggttattcgtaacgctttacttgctgacgacaagccgttattggactgaatgggtaaatgcggaagaggagctgcctgatttaatgcccgcattggccgatgtgttaaggctatttgaaaaaagcgcctgtatttatttgcaggaacgggacttgctgttgaaaaagttgattcagcatattaagcctgcgtactaccgtatgaaatatgagttgacagccgtcgaagccgccaaaccaatcctgcctgacgaatataaggaattgcaccatctagtcaagcgtagccttggaccgttggaacggcaattagggaagcggatgccagaggcggagaaaatgtatgtgacgatgttaatcggctcctggatgatgaggcaaggggaaagcattaataaaaaaataaaagcgatcgttgtctgtccgcaaggtgtctcggtgtctggctttatgttaaaggagttaagcgagctttttcctgagtttgtatttttggattctttatcggttcgtgaattccaaacgtgtgatttggcgtttgatctggtgttctcgcaaacgcctcttgaaacaaacaaaaggctttatatgactagctcattgttaaggaaagaagacagggcaagactacggcgccaagtaatggaggacgtttatggctatgcacctgttgagttcaatgtcaacgcagtgattgagattgtccgaaaccatgccttgattacagatgaaagcgggttgcaaaaacaattgcagcaatatttctttcctaatcgtgaagagcgaatgcctgatggccaggcagaggaaaagcagaatctccaatccttcatcaaaccagattcaatcacgtttgcccctgaagcgccttcatgggaagaggcgttgtctttagctgcccaacctttgctcgatcaaggaaaaattgaacagagatatgtggaggcgctaatgtcaaataaagaacgggacccatacatcattattggcccctacatcgccattcctcatgcttcccctgaggaaggcgcaattgaggcagggatgagcttactgcatttgcgaaaaccagttcttttttcagacggtgagtgggttcatgtcatggttgtgattgcagccattgataagcaccaacatatccgagcattaaggcagttgattaagcttgctggttcaaaagaagcgcgagagcggctgatcgcagcaaaaacagagacagaaataatggagctcgtatctttttattcaaaggattaggagaataagcaaatggaggtcaccatgctagtcgatgagagtaccattttaatcaatgtgcatgcgaaacataaagaagaggttctacagctcatgtcgaacaacctcgtcgcccacggatttgtaaacaaaagtttcactggcgcggtgatagcgagggagcatgagtttcccacaggtttgccgatggatgggatggcagtagccattccccatacggatattgaacatgtgcgcaaaaagacgattagcattgcccagttaaacgaacctgtagaatttggcgtaatgggcggaacggcttcagaaagagtagccgtgaaacttgtctttatgttggcaatggaagaagcccattcccagttaacgattttgcagcaactgatgaagttatttcaaaacaacaaagcaatgacacaattagcgtatgcaacatcgaaacgagaaatcaaaacggtcgttctcgatcatttaggaacagaagctaaaggaggaagatgttgatgaaaacaaaaaaagttctagttgcttgtggtgcaggaattgcgacatcgacagtggtaaatagcgcgattgaagaaatggcaaaagagaacggcttaaaggtcaacttagtgcagatcaagatttcggaagtaggcagccataaggatactgctgacttgctagtcacaacagcgatgacgcaagcagattttcctttccctgtgatcaatgctcgctcttttttaacgggcatcggcacggagcaaacaaaaaaagaaattttagaagcgcttaaagcttaagcgaaactgagtgttttcaaaagaggaggaacgtcatggatgggtttgtcaactttattcaagggttcttagatttaggcgcgaccgttattttgcccgttgctatctttttattagggttgttgttcgggcaaaaaccaggtaaagcgtttcggtctgggttaacgattggcattgccttcgtcggcatttttctagtcgtcgatttgctcgtcaacaatctagggccggctgcacaagggatggttgaccggctaggtgtggaactgaatgttattgatgtaggctggccggcatcttcatcgattgcttgggcttccatggtggctgcttttattattccgttaggtcttttggtcaatgtgcttatgcttgtgacaaaaacgacaaagacaatgaacgtcgatatatggaatttctggcactatacgttcacagcagccatggtatatgtggcaacgtccaatttgtttttgtctttgctggcagccgtgatttttcaagttatctgtttaaagattgccgattggacggcgccgatggtgagcgaattttatgacttgcctggggtttccattgccacaggtagcacgatttcctatgcaccaggcatctttttagtaaaaggactgcaaaagctcccaggcgtcaataaatggaacgctgacccagcgacgattgaaaaacggtttggcattttaggagaatcgatgttcataggcttagttctcggtgcagcgattggcttgcttgctggctatggcattggcgatgtgatcgatattggcattgctatggctgcagtaatggtgctaatgccacgaatggttaaaattttaatggaagggctcttgccgatatcggaatcggctcgcgaatggctgaataaacgttttggcgaccgggaaatttatatcggtcttgacgcagccgtcgcactcgggcatccgtctgttatatcaaccgctcttattttagtgcccattacagtcgctttagcaatcattcttcctggcaatgcgcttttgccttttggcgatttggctacaattccgtttattgttgcgtttattgttggcgctgctcgaggcaatatcgtccattcagtcatcgtaggaacgattatgattgcgatttcgctttatctggccacagatgttgccccattatttacgcaaatggcaatggaagggaactttacaatgccggaagattcggcacaaatatccagcattgaccaaggaggcaacctgattaactggataatcgttcgtttattcggtatattcgattaattttacgaaaagtaggagggctagaattgaaagcattagtaaaaacagcacctggatttggacatgttgaactccaaaacaagcccgaacctgctccaggggaaaagcaagtcaaaataaaagtcaaatatgcgggcatttgtgggtccgatatccatacgtatgaaggccattataaagtggccttcccggtaacacttggccatgaatttgcaggagaaattgttgaagtcgggcctggcgttcaatcttttaaagtaggggatcgggtcacctctgaaaccactttctccgtttgcgggcaatgtccttattgccaaacgaaagactacaacctttgcagcgagcgcaaaggccttggtacccagcaagatggcgggttcgctgagtatgtacttgcccgggaagagagtttgcatcttttgccagacaatgttgatttccgttcagcagcgatgacagaaccgttagcctgcacgcaccatgcgctagcgaaaacaacaatcaacgcaggcgatttgtgtgttgtcattggtcctggtccgattggcttactcgctgcccaagccgcgaaaagcaaaggcgcaaaagtcctgataaccggcctcaatcatgacaaggttcgccttgagaaggcgcgtgcccttgggattgattatgttgtcaatggcgaagaaacgaatgtcggcgaagtcgtaaatgaactgacaaacggctacggagccgatgtggtgcttgaatgttcaggcgccgtaaaagcagccaatcaagggctaaagttattgcggaaaaaggggcagtatagccaagtcggcatttttgctacatcagaaattccctttgacctcgaaacaattattcagaaagaaatatgcgtcattggcagcagaagtcagaagccagctgattgggaaccttctctgatgctattaaaaacaggcaatgtcaacgctcgtgatctggtcacccatgaatacgagcttcatcaatgggaggaagcttatcaagcgataaaaagcggagaagcgataaaagtgcttttaaaaccagagtaaagcagaactgcaacggagggacagaatggttgaacatttgctagattttatgcttggaccgcttagaggactggggcgcttttactttgaacaccaactcatctttaatacgcttattgtggctgtggcgttcgctaacatcatccgtcatagaaaaaggccacagcataacgagtaaagcgatttaggaggaaagcgagtggaggctttaaatttatatggtgctggcgacatccgttttgagcaatcgccaaagccaacgatcatgaatgacaatgaagtcatcgtccgtgtagaaacggcagggatttgcggatcagacttatcccgctataaaaaactagggccttatatttccgggacgacgtttggccatgaatgttcaggtacgattgaggaagtaggcagcaatgtcagccatttaaaggagggaatgcgagtcgccgtatgccctgctctcccatgcggcgactgcacccaatgtcggcaaggggctttttcacggtgcccgtcgctaaccgttatcggagctgtccagccaggggcgtttgcagaatatgtgaagttgcctgctgaaaatgtcctcccattgccgaatgaaattgatgctgatacggcggcgttcattgagccggctgctgttgtggcacacggtttttacaagacggcgattgaaccaggagcagatgtggccattatcggctgcggaagcatcggcttgcttgcgattcaatgggcaaaattgtttggtgccagatatgtatacgcaattgatatcgatgaacaaaaattaaaagtggctaaagaacttggcgccgaccaacgagtgaatccacttgatggcccagtgcatgaacaaattcacgatttcactgccggagaaggggtagatgtggcgattgaagcagcggggactccggttacttctgcccaagcattagcattgccgaagaaaggcggagaagttgtttttcttggtattccatacggggacgtgacaatcgagcgtttttattttgaaaaaattgtacggaacgaattgcgtgtccatggttcttggaatgggctgtccgccccgtttccgggcaaagaatggaaaacggcgattcattctttgcaaacaggagcattgcaagtaaagccactcattacacaccggttgccgttatccgatgggccatttgtttttaaggaaatggccagcggttcccctgggtatataaaaacgttgctttatccagggaaaacagggcaaaaagaacgagccatcactcatctgaaatagcgtttgttcgccaaagtatgtcaagacggttcgatttcccaggaaataaaggcgaatttttagagataaacagttttgatgatgaacgaatgtaatggcgttggagttaagccctggctcttgtgcctgttaactaattttttcttattttcatgtgggcagttgacagattggctttcatatgacatgataacgtcaaatacgaagaaaggaaaaggtacctcagccaatgaagcagtaattctatctacaaacagtaattaaacatccattgaacgagcgtttatgtccgctccatgaatatggcgattaattatgtttagagatgggattcgtctgcttttttgatagaggtgcacgtatactgcgattttttctgcccgtataggcaaaagtaggtcgacgtatgcgcacattcctgcggacggactctctctagcatatagagggggtttttttatgttgttaatgaaagcaaaagagattaagaaaagcgttggtgcacgggaactgttgaatattaaggggctctatctttataaaggcgaccgtgtcgggcttgtcggaaacaatggcgcaggcaagtcgacgcttttgcgcatactggccggcgagggaaaggctgatttggcgactttggaaacgtatggctcagtcgcttatgtgccccagctagaaaacgaaaatgaggcagtggcaggagagttggccagcaaatggcatgtcccagatggaagcgtccaaacaatgagtggcggggaacaaacacgcaaaaaaattgccgctgctttagcatccgatccgcatatttttattgccgatgagccaacgagccatttggatatagacggaatcgaacaactagagaaggagttaaccgcttttaatggtgcagtgctgttaacttcccatgataaagtattggttaataaagtgtgtacgaccatttgggaactggaagatggctgcctcactgtatatgagggaaattacgatcattatcttaagcaaaaacaggccaacaagcaaaaagcacacaaagaatacgaagcatttgtccaagaaaagaacaggctggagcaggcagccaaacagatccaagcaaagtctgcgaaaattaagaaagcaccgagcaggatgggcaattcagaagcacggttgcataaacggagttcaggtgttcagaaagcaaagctaaaccgcgctgctgaagcaatgcggacgagaatcgagcagcttgaagtgaaagaaaagccgaaggaggttgagccaattcgttttgatatggcccaatttcctactcttcatagcaaacgagcggtccaattccaaggctgccctgtacaaatcggcgccaacattctaaaagcaaacgttcatggagaagtgccgacaggggctaggttggcgattattggaccgaacggatcgggaaaaacaacgcttgcccggcaaattgttgaccgcagcggcggcttgcatgtagcagccccagctaaggtcggattttttcaacagcagcaagaaaacttgcacgaaggaaaaaccgttttagaaaatatgatcgaagacagcccgtatacacaaacgttcatccgcacagtcttgtcaaggttggcattttccagggacgaagtcgataagaaagcggctgtgttgagcggcggtgagcgagtaagggcttcccttgccaaagtcttcctttcaaattgcaatgtccttgtccttgatgaaccaacgaactacttggatatcgcgacaaaggactcactgttagaagtgctgaaggcctaccctgggaccatttgttttgttacccatgaacgagcactgattgatgaccttgcaacccatatcctttccttcgctgacgaggaaccgaccgtaacaatggttgcgcctgacgcagaagagcataaacgagacggtgctgaagaggtgaaagcagcgctattggcagttgaactgaagctgtcggaaacgctcggccgcctttcgacagcagtcgatgaacacgaaaagcaggaactggaccaaacctttcagcagttgcttgctgaaaaaaggcggcttttgcagtgaggaatcacaagttcactcaaaaccgctaaaaacagaataagacatttaaactaaaatacaggaaagatcgaaactgggtgaaccaatgaacggtttgcccggttttatatagaaaaggaccggtctaacttcaaattaaaacgttgatagggtgctaaggaagatcaatgattgaataagtggattctacggcttttcattatatgcagagaggttgctcttcaaccgaaatgtagtggtttttcatcgccgtttcagctgttcattttgaacagctgactgttcgctcgttagttagcttcagccaagaggagtctagccgatgttttacggatggcgggcggcaaaaactgtgctacaatacgtgataagtgcccacgatgttcgctactcgcggtgtacttattttaactgtaaggcgggacaaccgatgtattcttttgtgcttctgctcgtattgatcgccgttttgtggtatgcctatcagaaaaacaaagaaacgttcaaacagctttcaattgggcaaactgccggtgttttcgttgcgtatggcgctgcggtcgctatcattgtggctgcgctctattatgtggtgcagccagtaacggagccgattgccaatgagctgctaaagctagctgctcgctttgggttgctcattattgtattgtttgtttgcatgtttttcctagaaaaagtacttaagaagattacgaatggcgcctttccaccaaaaaggagataagctacgttctacacgattcattcgtacatcgtaggaaggaagagtcgattccactcattaagggggatggcttccaagtcttgagcaaccatagcccttgccaagcagcaattaggctatggttgtggttcgttagacgattacggcgaccgcaattcgtcttctgttacccatttatggttttgaactgtttcgccatctgcctcaaaatcaaccatataaaccgttgtctgttcactcgaatcaatgactgcctcggctccagccatccctttcatatgatctgcgtttagcacgacagtatcgccaggggcataagcctcatcttcataaccttccaactcttcgtgtatgacccatttatggttttcgacaggagcttcccccgtcgttggcgtatacgatacagcataagccgttgttgtataggcgccgacaatggtcgcttccgttcctttcattcctggcatatggttagcttccatcgttgctttgctcccgactggataggaaggattgtctgcttcctttaagccttcaggtacttcaccagaacttgaatggtccccatggtggtgctcgctgttgtggtcgcctgtctcttcatgagctggttgttcaggctctgggttgtccgaaccagcaccgcaacctgccaaactaacggccagtacagtacttgttattagtaatcgtttcctcatcaaaatgcctccttttccattctcttttcatattataccctagtagggtatatgaaaaacacccttttttcagagagatcctgttttagatagaggcggaagtagagaaagtggaaaaagaagctcgccccattttgaggcataagcttctttgttgaaatggggatagtttaactcacggtattttccaaaatcgtaatccgcccgtttgttccgtctacttctacttctgctccgattggcacactggctttgtagtaaccatgtcctgattgaagattcgtgacaagtggtttgcctaaaggcacaagaaaaccggaaatcaattcgtcatagcttgtgttgtaggcgatcgggcagctcgtgcatgtgcccataataatcgcttcgcaatcagcgaatttgccagcagcttcgaggtgtgccaaatagcggtagacagtattgactggttcatgcgtatcttctaaaaaaatgacttttccggctgtatcaatttcataaggcgtgccaaggctgtcaacaaaagaggtgaggttgccaccaacaagcgggcctcttcctcttccattaacgaggccgttaagcgggaagccaggtgggttttctagaaggcgtgggcttgatggcatcatggttgacgagaagaactggttgaaattgtagtcaggcgtgccgttttgaaaatcaagcaaaagcaaactatggaagccaatcaagtctgcttcctggtaaagcacgtttaataaaatcgtaatgtcgctatagcctgaaatgatttttggattggcgcgtatggtatcaaaatcaaggtatggaaaaatgccagcaacgcctacgccgcctcgtgtcggcaaaatccatttaatcgaagggtcttcgatcatcgtcataaaatcactggcgcggtcttgtggcggaccagctaaaaatccggtacgggcatagacatgttcgccgagcacaggctggaagccgagcccccttaagtaagcaacattcgcatttatcgcatcagcagagcgggggctaccaagagcgacgatcccaactgcatccccttgctgtaaacgcggtggtttttgggccatagtatacctcctttgcggcgtccttgcttttgcatgtatatgtggaggaggcctgcacaaagaacagcaaatcacgaccatttacatccaaacaagcgaaagccctgcacactgattagtgcagggctcaagcgcacacgttcatttgtctcgtgtatgctttgcaattgttgctcaacaacttcctttgagcaaaacatgttctatatttagtctgagtcgattttaacgagtgcggattttctcgatttcgtcagcgacaaattgtacatgtgggccaataatgacttgaatattatggttggatacgacattaatgccaggaatgccggtgcgtttaatttttgtttggtcgacttgagccatatttttgacttcgacacgtaagcgggtgacacagttctcaattgagacgacattacgatcaccgcctagtccatcatagatcatggccgccatcgctgtatacttgctcttgtcttgagcgttttcagtatcctctggcactttttcttcatcgttctcctcttcacgcccaggcgtcatcaagttaaatttgacaatcgtaaagcggaatagcgcgtaataaacgacagcaaagccaagtccttgcacaagcagcatccatggctggttcgctagcggcagccttgagcttaaaataaagtcaattagtccggcgctaaagccgaatccagctgtccactgaaaataagcggcaatggccaacgataagccggtaagcaccgcgtggattacataaagaacaggtgctacaaacataaacgcgaattcaaatggctcggtcacgcctgtgaaaaacgaagcaaatcctgcagcgagtagcaacgacgctgtttgttttttgcgtttcgttttcgccgtatggtacattgctagcgcggcggctggaagaccaaacatcataactggaaaaaagccagcttggtacatgcctgtaatgcctttttcaccgcttccagaccagaaattcgcaatgtcattgatgccagcaacgtcaaaccaaaagacggaatttaaggcatggtgaagaccagttgggatgagaaggcggttaaaaaatccatatacaccagcgcctacatagtgcaagttgctaatccacgttccaaatgtgacaaggccagagtaaacaaatggccaaacgataaaaagaacggcggaaatgaccaacataaaagctgccgtcataattggcacgagccgttttccgctgaaaaaagcaaatgcggccggaagttggacatggctgaaacggttatacatcatagcagcgacaataccggataaaatcccaataaattgcgtctgaatcgaaccaaacgcggcatttacattttctgggtccgtgcttgtcagcaatgcaactgaatcggtagacaacaagtgggttacaacaaggaaagcaacgagcccgcttagtgcagctgatccatcacgctcctttgccatgcctagggccacaccgattgcaaacaaaaggcccatgctcggcccgctaacaagagattcgcctgctgcaattaaaaaggcagcgaccggattgccttctccccaaccgctcgggtccatccaatagccgattcccattaatatcgcagctgcaggcagcacggcaactggcaacatcaatgagcgcccaatgcgctgtaagtaattcatcatcaacgatccatccttttttaaagtagtgtttgttgcaaccgtcttttcaacatcctgatggcaataaggaatggcggaggtagcgcatggaaacgtaatcgcttaacgccctctgccagcatgaacggaatgatctccataaaaaaatccaaatagcagcataaaacatgctgccatttggataatgcctggtttttcccagtaacacgccaattgtctattacgttatttaataaagcaaccgccaaatatgcaacgttaaatagagctcttcattggaggagagttcccagccgtactgcttatgaaggatacggccaatttttgttgcacattgataggcttttttgtatgttccttggataagttcaattaattcagggttaaattgtttgtattcgactttctcttggtgaagctggcgtaaaacaaagtaccgtaaatgcgtgagcagccgcaagtaatcaaatgattcttcatttagctggagctcgtaatcgaactcaatgattttgacaatccggttgatcacttccgtcatttttaccgtttctttcatatgtcgttgttgcccttgggcattcacaaaatggtacgttaaaaacgactcttcgcttttcggcaatagcacatctaattcatcaaagacaatccgaaccgcttcttttgcagccttatgctcttttgggtaaaggcgatcaagctcccacggatgtgaatgggggtaatcgatgccatctaacgtgcgctgaatcgcgtaattgagatggtcggccagcgccaaaaacaaatggtcgcttaactggacgccaataattgtttccgctttacggatcatcatcgctgccacttcgaaaacggcaacgggaatgttgtcaatcaactctgaaaaggggtgagtgctagacctttcagccgaatattttttagtgaccaatgtttcatcaatcgcatcgccttttttgcggttaaagccgacgcctgttccaatcacaacccattctaagccagcagcatcctccaccaaagcaatattgttattaaacgatttgatgaggttcatgcgatgcctcctagccatcagagcggccatagctgatgcctgatcggatcagtaacacgtacgaccttgtttgtacgtattatagtatatgaaagcatttccgtaaatagcgagaagtggaagtcatgcttgccggagcgcaaagggaaggcatttcttgcagccgccactatcggggtattgttcgctgaataggctagctaggaacgtttcggccaaactgtataggaccatgaataaatcgtgtcgatcaagaaaatgacaccccaaagcatcgaaatcgagtggatcgtttcattcggataagggctgttagctggattgtacgcttcgctgcttagccaagacaaatcgcgtacataagaaagcgcgtcgtcccaattgctcgtaccgagtgcaaaaaacaccgtttgcccaatgagaaacaccaacaaatgggcaaaagaggatcggcggtacatccgagcttgataactggggtccttttgttttgcgatttgctcccggtctttgtctgtaagcaaatcaatgccccgtaaacggccaattttttgtttcatccaacggtcaagctttttaaaatcttggatgccaaatgtgacagcgtacaggacaaagaccgtaataatgatttgcaatgttgataattcaccagtttctttgtacaacaaccagccaagcccggcttccaacgcagtaatgccaataaacaaaaaaataaagaccatgctggccttccgtttatcaaggccgtaacggaccacgccaaacaaaagcaggcaaacgagcgatgcaagttccattgcaataaaaagcggtgcggcaaattcgataattccttccattgcatgcatgtcttatatccatcctttctcttctgcgatccgcaatgcgtcgtggcggttagtcgtttcaagtttttgcatcgcagatgataaatagttgcggactgttccgagggaaaggtgcatggcagaggcgatcgtttctgtgctttcgccattgcgcactcgccggagcatctcttgttcacggtcatttaatgggttgggctgcaaacgaaacaacatgttgctaagagccggagagatgacgtgttcgccagctacaatgcggcggatcgctacaatcaattgatcaatcgggtcatctttaagcaaatagccgtccacgccaagtttcatcgcttgttcaatatagcctggccgcgaaaaggtcgtcaacagcgcaattttccctttgaatccatgctgtttcatgtatttcgctgtctcgagccctgtcccatcaggcatttcgatatccatgagaagcaaatctagctccccaaggccgggaaacgagcggactgaagcgccgctagaaacggctccggctacatgaatgtctttttctaagttaagcagtgactcaagcgcattgcgcaaaatcgtttgatcttcagcaattaatatttgaatcattttccttctccttttacgtgtcaagttggcacggccaacgtaaccgttgtgcctgagctaccgctttcccataaacatgtgccgccaacgaggcgcatgcgctctttcattgaggcgatgccgtcgcctttttttatgtcaggtgatccgattcccactccgtcatcgcgaatgtggcaaacaagctcgcgctctgtatgggaaaacgccaattccactctatcagcgcggctatgtttataacagtttacaagcgcttctcgaatcgacaacgccaccatggtttcaaccacttccgtaagtgtagggatttgttcttcaccgcggacagaaaaggtggtgaacgttcctttaaacaacgttttcgcatggtcgatttcaggcttgatttcgatatgctttaaaccagacaccacctcgcggacttgcttggcagcggaacgtgctgtatcaaggacatcctccatttcccgtttggctgctaggggatggctgtctgctaatcggatcgccagttcgcttttaaatttaatgacggcaagtgtgtggcctagcgtatcgtgcaaatctctagcaatccggtttcgttcttcttctttcgcaaaggcagcaagttctgattgggcactagcgagatctcgttcgagactgtgggctcgtttcatatagcgaatcgttactggcaaaatgagttgtaagaataaaaaaggcgcataaacagtcgtcaaaaacgaaagaggcttgcctgttgtgaccgtaaagacagccagataactggacgtcaagaacaacattgacaggcataagtaaggccaaaaacggactctgccacttacatcgctaaaaagaaaaagataaatcaataagctgtgatcaatcaatattgcggcaaatgcgaacagacaaatgccggcggcgctcgcagcgacaaagcgccaatccttccaccatagtgctacataataagcagctaaaatagccgcaaaacaaaacaagcgtagcaacaaaggcacttcgctttctaacgttaacaaattaaaaaacaaaaaagtaaacacgaaaatatcaacgaaaagatagcgtttcatttgttcccggggataaagtcgaatcatagggaggctcctttataggcaatcccttatattatagcgcctttatagattaagcgataaccggctagagtgctattcatagatgtcattgcttttttgtgacaggtgtcacacgtaaattgatttaaaaaaatgttgtgatttaaatttttaaattgtatgatagaacgtaaagaaaaagctgttgtgtgatcaaaagaagggcggtctcgctctctgctttgacagtaaccttaacctccacattccattgatgcatgcattatgtaaaagatgggaggaacaaaaaagaatgatgaagaggggacgtaaatgaaaacacgatcatttttacgtgaaagaaattttatgattttgctttctggcgtgtttattaatggaattggtgcaggcgtttatgcggtttcgggtatgttgcttgtcctctatttgagcggaaatgtcttttattcaggtctcgcttatttcgcagtaacattggcaaatgcgttggctttcttaatcgcgccatttgctcgatacgtcacgtacaaaaaaggcttaatcgtatgcgaagtgttgaagtcagcattgctatttacactaccactgttctacgcaacgattggcctgaacgtttattatgtcatcacattgctatttgctgtttctttgctagccaagtttacatacccgatcgaatcaacgattatgccaattattgttggtaaagaaaacattattaaagcaaatgcgtatttgcaaacggtgagggaaggaatgggtatcgcttttgttgctggggccggtgttcttgttgctttcatcggccctgttcaagccattttaattacagcggtttgccatttgttgtcatcattaacgtatacattattccgctttagacaaaacactgtccctcaagacagacaaggcatgaaacaaagcgtggtcgcctacaaaacagatttaaaggcagggatgacgtatatttctcaatcgcttatcccaaaaatgattgggtcgattatttttattaatatggcgctgggcgtaatggttccgaatttgcctgcctttacattaatgaaaggcaatagtgaagccatttatggtttttatttggctggattgtcacttggcgtcatgattggcacactagtgactccgatagtcaaagaatgccgtttcgggctgctaacggtcattggtttttctagtaccggcattgcctggcttggtactgcttttctgcccgtttacttttctttgccttgcttctgtatcggcagtatcgcgattggcatctttaatatcctcattttttcgtccatccaacaacaagtggaagaagcgatgattggccgtgtcgtgacagtcctatccagtgcagcagcagtcggtgtgccggttggttcccttataggtggggcgcttggctctacctttacccccgtcttgcctgtggcgttttgtgggatagcgatgttgttatttagtgccagctggttggttcacccagtccttcgaaagcttccggccattgaaaaagcctctttgtttgttcaaaagccagtgcaaagtcagtcggtataggaaaaacatgattgtaatttaggagagaggaaaacgtcaaaaccgaaggagagtcccttctccttcggttttgacgtttgattttggcgaagaggcatgatggtcataaattcgatttgtccggcttacgggtgttttttcatttttttataagcaatgttatgttgggaaaatgtaattccattccatttagaggagaaatcttttaaactgaagtataaacgattagcaaagggtggtgttgagatgaagcgtattattgtgtgtgaccgtgacttaagcgagtgctacggaatggagtggttgattcgttcttctcatttgcaagtagagcgtgccggcattgcatgttcgccggaagaactgtttgaacaaatggaaacagaacggcctgatgtcatttgccttgaattggatatgtttcaggggcgtgaatgggaacaattaaaacattatacggccatctttacgcctgctcttgtggcggtttctgcagaaggaacgtatgcaaaagcaatgcaggcgctagaacttggctgtgtcgacttgcttataaaaccacttgattctgagaaactattgcggcatttacacaagttactgcgagaaaagcactctgttgtccagagcgaaaaagaagagcctgagtggccctgtccatcgtaccgtgacctttttttgcctggtcggaccgattcgttttcaggagatgtggtgctcatccaacatgaagagaaaagaaaaaccgtaaaattgcttgaatttgccgaagctttcccatttacagataaaccggctattctcccgcttagtgacgtggtgatacttgtgtttcctgatcgggacccttggcgggaaaaactgtgccataagctgcttaatagttggggggacgaaaacaacggcttagctgtctttgttttggaccaaaaggaaaatcgtactttgcaggaagcgtatcagcgagcgctactccatttgcaacgagcattttttattggttttgaccaagtgatcgtaactggcgaagcattttcatgggaacgaattgatccacttttgacaccagaggaacaacgaatttggatcgaaatgctgagagaaaataaactcacttcccttaagcaatggctatacggggaattttattatgccagtggcgctttgcccgatcctagactgctgcggattaagttgacaagcattcttgcccaagtgcgccggtatatgcgtaattggaaaatggcaggagaggacgtggaacgcgcctattacaatttgtttaatagcgtattaaatatgccagttttagcaaggattgtccaagagctcattttgtttattcaatttctgtttgagcaaacgcgtcgcgtggaaacggtccaaaaaacggacgttgtccatgaagcgctccgatatatgaacaagcattaccaaaaccctaagcttaatttaacccgtgtagcagagcatgtcggcagaaatccttcgtatttaagccagttgttttccatacggctcaaacaatcgtttcgccacgcgctgcaagacattcggattgcggcggccaaggagctccttgctgaccctatgctcgccatcggtgagattgccgaacgggtaggctatgcaaacccagcctatttttcaaaggcatttaaaaaacaaaccgcgtacagtccgaaccagtaccgcattcgagaactaactacagaaaaggattaaacctaaaaaaagtgcaaatgaaaggaaaattttcggacagaaataaatgaaaagtcgaatatatgaaataaaaatccaatcgaaatcagctaggcgcaaatgatgtagctccctatactgctaagtaagacatgtaaagggggaaatgccacagtgaatctgaacaatgaaccgattcgtgcgaaaagaggcactgccttaacggccaaagggtgggtgcaggaagcagcgctccgtatgcttatgaataatttagatgaagaagtagcagagcatccagatcaattagttgtctacggcgggattggcaaggctgcgcgcaattggccgtcttatcatagtattgtttcatcgttaacaacgcttgataacgatgaaacgttgctcattcaatctgggaaaccggttgctgtctttaaaacacatgaagatgctccgcgggtgttgcttgccaattccaaccttgtccctgcttgggcgaattgggatacctttcatgagcttgataagaaaggcttaaccatgtacgggcaaatgacagctggaagttggatttatattggtagtcaaggcattgttcaagggacttacgagacgtttgccgaatgtgcacgacaacattttggcggctcattaaaagggacgattaccgtaacagctggattaggaggcatgggcggcgcccaaccattagcggtcacgatggcaaatggggtggctatttgcgttgacgtggaccgttcccggatcgacaaacgtatggagaccaactatttggatattgtcgcccatacgctaacagaggccattgaggaagcagaactcgcgaaaaaggaaggcatccccctttcaatcggcttagtcggcaatgcggctgaagtgttgccagaaatgcttgatcgcgggtttgttccagacattgtcactgatcaaacgtctgcgcatgatcctttgaatggctatttgccaaaagggttcacccttgaacaagggcaagtgctgcgaaggcaagatccccaagcttacattagccttgcgaaaaagagtatggccgagcatgttgaagcgatgcttgagttaaaaaagcgtggcgcgatcgtgttcgattatggcaataatattcgccaagttgcttttgatgaagggattcgtgacgccttttcatttcctggttttgttcctgcatatatccgcccgcaattttgcgaaggcaaagggcctttccgctgggtggccctttctggcgatccagcagatattgataaaacggatgaagtgatcttgcaagagtttgccgacaatgaaccgttatgccagtggatccgcatggcacgtcgccatatttctttccaaggccttccggcaaggatttgctggctcggctatggggaacgtgcccgttttggcaaacggattaatgaaatggtcgcttctggagaattgtccgcccccattgtgatcggacgtgaccaccttgatgcaggctcggtcgcctcgccgaatcgggaaacagaagcaatgaaagacggcagtgacgccgttgctgattggccaattttaaatgcacttgtgaatacagctgcaggggcaagctgggtatctgtccatcatggtggcggcgtcggtatgggctactcccttcacgctggcatggttgtcgtcgcagatgggacagcggaagcggcacggcgtttggagcgtgtgctaacaacggatccaggcctaggcgtcgttcgccatgccgatgctggttatcaaaaagctatcgaaacggcaaaagcaacaggcattgtcattccagcccttgcaagggagggaaaagaaaatggctgaacttttatatctcaaggaagctgaacaagttgtcactgttgccggagcaagcgacaaaccaaaagtaggagaggacttatctgaaattggcgtcattgaacgggggagtgtcatcgttgagggagagaagattgcctttgccggtacagacgcagatgctcgtcattacttgcaaaaacgttctggaaaggtgaaaacgattgaggcaacggggaaaatcctcacgcctggactcgtcgaccctcatacacatctcgtctttgctggcagccgtgaacaagaattgacgatgcgtttgaaaggcaagtcgtatatgagcattttacaggcaggcggcggcattttaagcacaacaaaaagcacgagagcagccactgctgaccagttggcccatgaatcgcggctgcggcttgaccgttttttgaagcacggggtgacgaccgttgaggcgaaaagcggctacgggttagcgacagacgctgaactaaaacagctccgtgtcgctcaacaattaaacaatgaacacccagtagacgtcgtctcgacttttatgggggcacatgcgattccgcctgagtggaaacaggatcctgatgggtttgtacaattagtggcagaagaaatgattccccaagtcgcagctgaaaacttagctgagttttgtgatgtcttttgtgaagagggcgtctttacggtcgcccaatcgcaatacattttggaggaagggaaaaagcatgggctaaagccgaaaatccacgccgatgagttggtttcctttggaggggctgagcttgccgcaaaagtcggggcagtcagtgcagaccatttgttaaaggcctcaccaacaggcatcgaacaaatggccgaggcaggcgttatcgccgtgcttctgccaggaacagccttttttctaatgaccgagcccgccaatgctcgggcgatgatcgaagcaggagtaccagttgccttatcgacagaccgtaacccaggttcatcgccgactgagtcattgccattcataatgaatttggcttgcctgacaatgaaaatgacgccagaagaggtgcttgccgcttccacgatcaatgccgcacacgccattggccgagcgaaggacatcggcagcattgaagcaggcaaaaacgctgatctcgtgctatttgacgcgcccaactatcaaacattgcagtataactatgctgttaatcgagtcgatacagtcatgaaagcagggaaaatcgttgtggaaggcggtgtgttacttgaaaaaaccgacaatcaacggtgctcgcttgcaacggaagatcgaggaactcggccaatttggcaaaaatgagaaaggcgggttagatcggacaacgttcacgtcggcggaactcgctgctcgggaatggttgcaaacacaatgtgtcagccttgggcttgatgttaagtgcgatcccgccgccaatatatgggcttttcgcaacgggcgacaacctcttcctgctatttcgtttggctcccatatggatacggtgccaaacggtggcatgtatgatggcgcgctcggtgttctcattgccttagaagtaatggaacgactgaacgaagaaagaatcgaaacacgccatccattcgcactcgtttcctttacggcagaggagccgaacccgtttggcttatcgacatttggcagccgggcagtagcaggaaagttaacaaagcaagacttagagggtgtgacagatgacaatgagctgttgttgacggaagcgcttaggcaagcagggggagatcccgatcgctttgaggacacgcacgcgttagcgccgcctttatctgcttaccttgaagtccatattgaacaagggaaacgcttagtcacaagcagtattcctgttggcattgtttctggcattacgggcatttacagagagcttgtaactgtaacaggtgatgccaatcatgcggggacgactgtcatggccggacgtaaggatgcactcgccgctgcggcggaagtggttgtagctgtcgaacaggcggccgcggaaatgcaggcagaagaagtagtcgcaacagttggcacacttgacgtgcgcccgaacgccgccaatattatccctggccaagtggaaatggttgtcgaaattcgtggcaaaacaagcgcagaaatcgatgctgtccgccatgcattaaacagccaaattgcagaactcgcaaggagacgtggcgtttcgataaagcaagaaacgtttttatcgcaacggcctgtgccaatggacaaattactaatcgatacattggcggagcaagccgattcacttggctacaagacgctgacactcgggagcatggctggacatgatgcagcccatatggcggcagtgacaagaagtggcatgttgtttgtgcctagcattggcggcaaaagccattgccctgaagaagcaagtgcactctgtgacattgaggcagctgcgaatgtgttgttccatgcgctgctgaaacttgaccaaaaccttgaccagaaagggacggataccagatgaggacgctttattcagctgatttgatatatacagatggcgcgtttcaacaaagctatgcgatgtgtgtaaacaacggggaaattgaagccattggcccgcaagaaaacatgtcacgcttatatagccatgtgcctcttgtggccatggatggcaaagcgattgtgcctggcacagtgaatgcccataaccattctttccaaagcttgctaagaggcattgccgccgatcagccgtttttagagtggcgcgacaaggcactgtaccggtatacgcctttcttggatgaggatgcaatttatacaggggccctctttgcttttggtgaaatgttgaagtacggcgcgacgacagtcagtgactttttctacgtccatcgtggcggcgtggaaaccgatgaagcggtgatccaagcagcgaaagatgtcgggatacgccttgtttttgcacggacaatgtatgattgggctggggcgccagaagcataccaagaatcagtcgacgaagctgttgcacggacacggaaattggcggccaaatacgagagtgatccgatggtgtcgatccagccagcccctcatagcccacatgctgcctcgccagaaatgatcaaggctggccaccggcttgcccaagagctaggcacgccgttccatatccatgtagcagaagagccgtttgaagtcgacgaaacgttgaatgcatatggcttgcggcccgttcattatttggactcattaggcgtcgttgatgaaagcatgattgcgatccaccttgtctggcttgacgattcggaagtaactctgcttggcaacaaaggggcaggattggcttattgcccatcaagcaacatgtttctttcagatggcgtgacgcgcattcccgatctccagcaagcgggcgtgcgcattggcctcggttcagatggagcttgcagcaataaccgcattagcgtgtttgaagaaatgcggatgtgctcattgctgcaaaaagtcacgcgtctggacggcacatgcatcactgggaagcaagtatttgaaatgggcacacaaacaggagctgctttgctaaagctgcaaactggtgaattgaaaaaaggcttccgcgcggattttattgcactcgatttgaatgacttctctttatcgccacgaaccgatttgttggcaaatctcgtgtatgcgatgcagccaacagcgattgccgacgtatttgtggacggcaagcatgtagtggcgaacaaacagctcgtcacgcaatctgaaaaagcaattgtcgagaaagtgggacgtctccatcaaacatgggctcatgccctagctgcccagtaagggggcgccatggagccctttaagcaacagccacgattagaggctaagcaaggaaacggttcttcccctcgagcgctgatccgtttcttgctttatagcagcattggcgcgtttatgtttttcgtgcctgtgccaatcaacggtacatcttccattatgcttgaccatatcgtgaccgcaatgaggcaggctttccctgcaattgtgccgtactatgcgttgcttgtgatttttcttggcgcgctttatccgttttacaaggggacatggcggcagacaaagaccgatttgcttttggctgtttttaaacttgctggtttagcaattactgtcatggtgctattcggcatcggcccgcaatggatgttggcagaggacatgggcccatttctttttgatcgccttgttgtcgctgtaggtcttcttgtcccaattggggctgtatttttggccatgttaacaggatatggtttgcttgagcttgccggtgtatggatgcagcccattatgaggaaaggttggaacctgccagggcgttctgcgattgatgttgttgcttcgtttgtcggcagttattcacttggattgctgattacgaacaggctttttcgcgaggggcgctattcggtaaaagaagcaacgatcattgccactggcttttccaccgtttccgttacttttatggtggtcgttgccaatacactcgatttaatggcgaactggaacgtgtatttttggtcttgtttagtcgttacatttacagtgacggcggtaacggctagagtctggccattaaaacaaacaacggaaagctattataacgggatgacaggcaagcctgaagcagagcagcaagggcgccgactccaacgtggctgggcgcaggcgatggcacaagcgcaagggagcctgagcctatctgccaatatttgcgcaaacgtccgtgatgggttccgcatgacgatgaacattttgccatcgattatgtccattggccttttcgggttagcgctggctaagtatacgcctctgtttgcgtggcttggagtgttatttttcccagtaacagcactcgtccaattgcctgatcctgcctttgctgcaagtgctgctgcaacttccattgctgaaatgtttttgccagcagctattgctgccgacgctgatctcatcacccgttttacgattggcgttgtttgtgtgtcttccgtgctgtttttttccgcggtcattccgacgatcttggcgaccgacattcctgtcagtgtgccgaaattgcttgtcatttggtttgaacgggttgtgttaagcatcttgttggctgcgccaattgctcatttgtttttataaggagtaaaaactggcgcacatgtcaaaacccctcttccagtgcaacgagttggagagaggggtttttcctgttaagtgaaatagcgggcttccacaatttgtggctcatattttttaaaggtccggtcaagaaagtttaacacacgttcctcgtactcagctttgtaatgaaaatagcttcttatatggccgcctttttcaggtagccaaagctcactgccagcggcgtgactgtgtatcgcttctgactctgtgtaaggaatggctccatctttgcggctatggattaaaaacaagcctttttcttgattgtactgggttgctgcataaatgggccttacgtcttctaagttaaacgttgggacaattgcttcaactgcccgggctgttcctgccgcaagggacttcggcagcccggtccaatagtggaaactgtttttagcgtattcgtttagatcggaaaatggactgtcggcaaccactgctttgacttcatcggcttctgctcctgccatgatagaagtggccgcacccatcgaccaacctaccaaggcaatgttttcaatcccttgttgatcatgtacatagcggatcgcgctaagcaaatcgcttttttcgtttccgccaaatgttgtaggcgctttttcagacatgccagaattgcggaagtcaaacatgaaaacatgatagccagcttcatgcatggccgccgccaattcaagactggaaaacggcatttcggtacggttgtagccataaccatgtgaaaatataaccgctttttcattttgaaaaagcgattgctggtcggaaggaatccaccagccacttaacgatatattgtcaacgatgtttgagaatgagacatcttcatagtcaaggcccacgttatttgggtttgtatgaagcaagcggatcgttgggttcgttactttatagccaataaatacagttaatgcagcaaggagaaccacaatagccataagggtggtcaaaacaatgaaaagccatttcttaaagctgaatgtgtttcccatcacatcaactccttcataacaaggtccggatcataagtttgaaaatttagatacttttatttagtatatgaaaaaaatgaatcattgtgtgtacagtcaagcaattgcagttaataaagaacgaggacgagctattcttatcataacaaacgagcatgtacttgaatcgttgttcttatcttttattatatgaataaattgttgcgaacgcaagagatttgtctggttttctctcatgataacacacatttatacataatgtcgaaaaggctcgtctcttttactacctctgcacgcaaataggctacagattgaatcatatactttttttctaaatcaatgtttaggaaactttgcgtaagaacatggggagcgaagccaaatagaaggaaacatagaggacgcgcctagcaggaattgaacctgcaaccctcagcttaggaggctgatgctctatccaattgagctataggcgcataaaaagttccgacttgattagattatcgcaacaaagcgtgagaagcaagcccttgacgggaaaatttttgccaaaaacgttgcgaatgataaaataattgaaagaagcctatttcacgagaaaacaacctaaatcggctcccggttttcgcaaggtttgctgaaaggaaactgacgaaaatacgagtaaatggcaatgacgcgaatgtaattcatacgtcctgttgtaagtcaaaaaagaggaggcacttatggaccaacaaaaaatcgacgccctttttacggtagcaagcaagttaaaagcaaatcagattgctttttcattaggggggagcggcctgctgtatgcattagggttgacggaaacggtaaacgattgggacattatgacaaacgctaacaagaacgctgtgacgcaagcccttttcccaataaaagcgttcgaaacaggacaaacgggtgaccacttatttacgagtagttataagctatttgtcgaaaaaaacggccaagaagttgaaatcatcggcggttttgcgcttcgctcagaagcaggcatttgccacattccagcggatgctgcttttcattggcaaggcataccagtaggaagccctgaagcttggcttgttgcctacgtcttaatgggacgagagaaaaaggcagcgatgctcgagtcgtacttgcaaatgcatggggcaaatccggctatgcttgaacggttaaagcaacaaccgcttggcgataaactcaaagcaataaagtggtttgcttaatgttgctagactgttccgaaaatggaaatcactttatgcaaaaagtgaaaacattgggcgtgagggtttcagtaatgatttcccttttttgcgagacaatccgatataataataaataagaggaggggagagtgtgaatgcagtacgcaatagtgaaatcggcaaaaaagtcgcccagttgtaccgttgtattgtcaaacgccaagtccaacaagcagccatcttaaaagaagagcttgatgtgcgtttcaaagaactgcttcgcgatgacaaaatggttgcgtattacaatctcgtttgttttcgctatcaaatgatgcttgaacagttgcaagaaccccatcagctagaggcactcgtcaattgtttgcggtcggattttttgttgaattattactattatttcttcagtggccaatatgccttctacaaagaacggtttacggaagctgtcgatttatatgaacaagcggaaaaagaattagcgcatattcaagacgaaatggagcatggagaattttattaccgtgcgggcgtttgttattataaaattgaccgatttgaccgggccatgctttatttagacaaggcaagacgctttttcgcccttgatccaatgtacgtggaaaaggaattgcaggcggaaatgatactcggcaacctcttatcggaaacgggccaatacgagaaggcagaagcgcattttttaaatttgctagaacgggctgcaggccttgaggaaacggaagggctcattttacgctctcttggacaaaacgctgttcgcaatcatcatttttataaagcagaaacgtattatcagcaagcgttggctcattcaggccatcgcactagtcgctattcgacaaaaacgaaagcagaactggcaaatgcgttatttaggcaacagccgccaaatgtagaaaaggggagcaagttgttaaaggaagctttaagggcaagtggaggcggtttatcgacaaactcactaaaacgcttttcgggcgaggagagatttcgaatacgaataggacaggcgtggtcgttccagagtatttgggcggggtaaacgacccgcatgcaagcgttaggcacagtctgctgcgggcaagtttggctgcattttttaattggagtgataaaaacgatgatgttggaagacaagctttatggttcaatggaagttgagccggtactacgcgatttagtgaacagcagaccgcttcagcgattaaaaggtgtccatcaggctggagcggcttatcttgtttgtccggagtggaatgtaactcgctatgagcactcgattggagtcatgttgttaatacgtcgattaggaggttcgttaaaagagcaggccgctggcttgctacatgatgtttctcacacagctttttcccatgtatctgactatgtgtttaagaatgaaaaggaagattatcatgaacaactgtttcataaacgaattgccgaatcggacattcctgccattttgaaaaagcaccaagtcgatgtaaacgagattatcaatgagatcgagaaatggccgttgcttgaacagcctgctccacatttatgtgcggaccgaatcgactatacattgcgggatttatatgcttatcgatttatttcccttcaggaagcccatcgtttcttagagcagcttattgtaaaaaaagggaaaatggttgttcaatcgttggctgcggcagaatggtttatcgaagcctactataaagaaacaatcgaatttttcatggaaccgcgaaatgtgtatgccaactggaaaatctccgaggcattgcgattagcccttgagcgcggcgcaataaacgaatcggatctattggctgaggatgaagaactcataaagaaactgaacgaaagtggggatgaacaggtccggcgccttctggccgagatttattctggcgtgtgtgtaaaggaagcaacaggcgcatacgatcattaccataaaaacaaagtccgtatcgttgacccgttgatagatgtaggtggcgcgttcgtgcctgtgtcaaaatgctctagaaaagcggctgacctcatcagcaaagcgagagagaaggcagaaaaaggcatttatttgaaagtcatgcataattaattccgtggcacacctgtatacttgaagggtgaatatacgaactagaaagtaggaatatacgatgaagacagaagacttttattgtgaagaagtgttaagtggcaaaacagcagtgaaaaaagtaatggaaacagaaaatgtccttgcttaccaccatacaaatccttattaccctgtacatattgtcgcgatccccaaaaagcatattccctcattattgtcgttagaggaagaagacgatgcccttttgcttgaactgttttctgttatcaaaacagtcgctgcacaagttaaggctgagcatggcgcctgccgtgtgttgacaaaccttggcacctaccaagattctaaacacttgcattggcatattgcatttggcaagccacttaaatgagtaatagacaagtcagaaaacgctagagaaggagatctgtctatggtcatacaaacactaggaagcaagagcatttcattaaaagaagcacatgagtttgattggctttcagaactaggggatatctttgctgtttttgaccaacaagactctggaaatgtaagttttggggtagcggatggggacaagaagtggtttgtcaaatatgcaggtgctaagacgctttactatgagggggatattcaacaggcagttgagcgtataaaagaagcggttgctgtttatgaacatcttgctcatccaaacttggttacattgcataaccatttcgccactaatgggggctatgcccttgtgtttccttgggcagagggcgaatgtttgcatgcccattggttatttccgccgcctgccaagtataccgatccaaactcgccgacctataagcataaacggttgcctgtagcgaagcggttagatacgcttgatcgtatttattcctttcacgaacacgtcgaacgtaacggttacgtcgcgattgacttttatgatggcagcattttgtatgacttttcaacaggggtaacgacgatatgcgacatcgatttgtatcggaaaaaaccttatgtcaatacaatgggaagaatgtgggggtcaaagcgatttatggccccggaagaattccaacttggcgcagcgattgatgcacagacgaatgtctacacaatgggggccgttgcttttgccttgttagggaatgaaaacaagcggacggaggaaaactgggacgctagcaacgctttattcgaagtggcaaaacaggcaacagcagcagagcgagaagcgcgttttccgactgttgctgctttcgttgcagcatggcaagaggcaaaaaaacgttaaagagacaaaggcgcaaaccacatcaacagcgcttaaatgaaaaatctagtatgtatcgaggcatcgtttgtccaaactaggaatacacgtaaaacaaaaagagttttaggaggttcctagatggacaagcgtgtggtgctaagtgttgctgctgctttgctgcttattggacagccagcaggcgatcaaaagaaagcagaaacaaaaaaagagcagccagcgataacagaagtagtcgatcaaaatgaagaaccccatttgcactataaaatccaggaagagggcatttcttattcggagagcacactcatctacgatcaacaaccgattgcccgcgtgtggatgaaagtgaatggcgaagcggacaattacaagcaacaagtcgccgtcgcacaagcgcttcatgacgaattggaagaggcttacccaggtttgagcagaggggttttggctgatgttgctcaggcagcaacagcggatccaaactcagtgtctgtctatgtaggtggacaggaaaatggcaaggaagaaatagacatggcgattgtcctcgttcaggaaatggcagaaaagcttaagatcaaacaaaaacaggaacggagtggaagaatcgtcgattttgattagcgggggaggggttatgatcattacgaaaccggcgtttgtggatcgtttggaagaggccgagacgaacatgctcagttcacgcttgaaagcaatagaaacgatagacggcaattcgctcggagtagcgattgaaacatttggacaggcatacgcgttttctgcaaagcgtatgccaggacccgcgtttaatacagtccgaggcttgcgcgaggaagaggaaagacaaattggcgaaatcatttcgttttatgaaaagaaagaactagaaccacaaattcaattagtgcctggcgccgctgggagcaaagtgatgcaagctctgtgtcgacagggcttttgccaaaccggttttcattccgttcttgcaggacgttgtagcagacaagtagaggagaggcacgaaaggatagcgattcggacgttaaaactggaagactatcgtctttatggccatatttatacagaaagtttcggcatgcctgctttttttaaggaaagtgtagcgacaaacaacgccgtgttgcatgaagaacgaaattggacattttatttggctgaagtcgaggaagaaccagtaggggttgccgctttattcactagtggcaccattgctgtacttgctgcttgcgccgtgcttgctcgatttcgaacgcaaggtgtacagcaagcgctcattgctaggcggcaggcagacgccgcagctgctggttgtacatacatttgcggccaagctggatttgcgacaacaagtcagcgcaatatggagcgatcaggcttgcaaaccatttatacgaaagcgctttggcagcgtgtttcataagagctgtgccgtaatgggcagctcttttttgcgcagtggcagtgcataaatattccttttcgttaatttacataaatttgtgcttgctttttaagaggaaggcgactaaactgttgctaactaatattcgttaggtggatggcgatgacaaaagaaaaaatcaaacaagcggcattagttgcgtttgccaaaggcggctacgagggaatgagcctggcggaagtcgccagtgcagttgggatcaaaacaccttcgatttacgcgttttttaaaagcaagcaagacttgtttatgaccatttatcacgaactgcttgatgagcatgccgctcaattagttcagcaaactaatgtgatggagatcgaaggaagtgaacagcggcttcgcaaagtggtggaagccatgcttgattatcatctccgagagcaaacaaaaacggaatttttaacacgtgtcaatttgtttcctcctgattttcttaaggatgagatgcgcagccggtttgctgctaatgaacaacagatccgttcctctttagttgctattttttcggaagggattaaacaaggggatattcagagcgaaccgttgcatgagctggtcgattcttttctttgcttattggatggattgtttttacaaacgttttactataacaaagaaacgttggaaacctccttttttcatgcgtggaaattttattggcaaggcatatctaatcgtacggccaattgttaacaaggaagtgagcgagagatggaagaagcatataaaacaatcaatgactttgaaagggagcctgtgccaaaagaagtgcgaaaaggctggctgccgatggcgactgtttggtttgccatcggcattgatttatcaggcatgttgttaggcgcacaacttggagcggggatcccatttgttgaggcgttgctggcagttgccgtcggctctctttttcttggcgtgctaggcgcaatttgtgccaatattggcgctgcaaccggcctgtccacaacgatgatttccaattttgtttttggcgcggctggagcaaaagtgatttcagtcgttatatcaatttcgatgatcggatggttcggcgtccaagctggattttttgccgaaaatacggtatctgttgttgaacatttaacaggctgggctctgccccttccggtagttgcctttgttggcggactactaatgatgacgaccgcatttgcgtttagatggttcgaaaagctaacaaattggacaagcccgctgcttgttgtcttaattttagcagcgttggtattagcatttacgcaaagagatgctagcgccgtgttggcaccagtagaagcgaagttttcattcggagtcgctgtttctttagtggtaggcatttatgtacttggcacgattctttctcctgatatttctagatgggcaaaatcaaagaaagatgcgatgattgctgctttcttaggctttttctttggaaatagctttatggtcgttattgccgtgctgttgtcgaaattgttaaacacagaagatttggcccaagtatttatcctgcttggtttaagtttaccagcgttaattgtccttactttttcccagtggacgacgaatacaaataatctctattctgcttctttaagcatgtcggtgctaattccaaaagcaaagcgtcccgtgttgacgcttgtaatgggaatagccgcttcggcattagcgtttataggcatatttgaccactttattacgtttttatcattgatgacgatgttgatcgctccagttggaggagtgtatgctgctgaatattatgttgtcgacaaacagaaattctcgtttcaagcccttcacagccgtaagctgatcggccgttcgctggccgtatggctagtcacgtcattgttttgttggctgacaacgccggcgccagatgggttgggcctgctcgttttcacaaccattccagcacttgatggctttatcgtcgcatttgttttgcaagcgctaattggaaaagctgtgttcgcacgcaagaacagataaacaggaaaaggagaacaaagtatgagatggctaacggaagaatcgattgaacatatcgccttgggggcggccgttctaggtactggaggagggggagatccatacctaggtaaattgatggcgcttgaggcgatcaaaacatatggaccgattaagttgctgtcgattgaagaattggcagacgatgccttaattgtgcctctatcgatgatgggttcaccgacgataggcgttgaaaaaattccttcgattgaagaattggtggctccacttgaaaaaatcgaggagacgcttggccaaaaagcagctgccttgatgccaattgaggtcggaggcgtcaattcacttgtgcctgtactagctgctgcggcaaaaggcttgcctcttgtggacgcagacgcaatggggcgtgcttttccagagagtcaaatggtcactttttacttggatggccattcggctgatccgaccgtgttagctgatgaaaaaggcaatacggttgtgattacgccaaaggacggccactggggcgaaaagcttgcccgggccatcactgtgcaaatgggtgggtctagtacggtgtgcgactatgcacttcctggttctgttgtaaaaaagagcgccattccaggcacgttgacaaaatcagaagaaatagggcggctgttgcttcataaaagcggagatggcacacatccgattaaacggctgcttgccgtccttaacggctacgagctgttaactggcaaacttactgatatccagcgcacactaacgggcggttttactcggggaatttgtgaagtcgaagggatccatgacgatgcaggacggatggttacactccattttcaaaatgaacaattgttagcgacagaaggggaaaaaccactggccattacgcctgatttgatagcgatccttgatgttgaaacggggcagcccattacgactgaaggattgcgctacggcatgcgggtgacggtcattgcatttccgtgcgacccgaaatggcgtacaaagaaaggtattgaaacggcaggacctcgttattttggctatcctgtggagtatgagcctgtagaaaagttgcaggaaggtggaggcaaatgagctatcggattggaattgatgtaggcggcacaaacacagatgccgtcctacttgatcacacattgcacgtaatagcgaaagcaaaacagccaactaccgaggatgtcatgactggtatttggaaagtgttaactgccattctagaggaatcagctatatcgcctggcgaaattggctatgcaatgcttggcactacccattgcacaaatgccattgttgagcggaaacagctaaataaagttggcatcattcgcctttgtaaaccggcagcaacggctgtgccccctttagcggcttggcctgatgacttaaaagcggcagtgggcgagcaccactatttagtagctggcgggtatgagtacgatggcgcgttgatttcagaactagacgaaaatgaaatccgttctgcactggaggatatgaaagaaaacgttaaatccattgcggttacaggcatattttcgccagcccgagccgagcaagaactgaaagtagcgcgccttgcccatgatatcatgcctgacgtgccgatttcgctgtcccatcaaattggcagcattggtttgttggaacgggagaatgcaacgattttaaatgcagcactgcaaacgacgatacgtaccgtcgtttccgggttccgtgaagcacttagcaaacttggcatccctgcgcaaatctttattggccaaaatgacggcacattaatggaagccgattatgcaatccgttacccgattttgacaattggctgcgggccaacgaattcgattcgcggggcctcgtttttgtctggtttaaaagacgcccttgttctagacatcggtggaacgacttctgatatcggtgttctatcaaatggatttccgcgccagtcagccattgccgttgatgtcggcggcatccgcaccaacttccgcatgccggacattctctcagttggcttaggaggcggaacaattatccgtacagacgaacagggcgcaatcacggttggccctgattcagtcggttatcgtttattgcaagaagcgcgctcttttggaggcgagacattgacagcaacggatgtggtgttagctgtgacagacaaaacgattgctggcgctgatacaagcgatttagacagcgacgcctgtcaacaggcgtacaaacaaataatcgaaaagcttgaggttgcgattgaccaaatgaaaacgtcaaaagagcctgttcctgtcattttaacaggcggtggcagcattctagtcaacagtcgattaacgggggcttcagaagtaataaagccagaccatcatgatgtcgcaaatgcaattggggctgcattggggactatttccggcgaagcggaaaacatctatgcgttggaagggcggacgtatgaagatgcagtcgaagaagcaaaacaaaatgcaattgggaatgcggtcgaggcaggagcggttccggacacagtcaaaattgtctctgttgaggacgtcccacttgcatacatgccaggaaactccgtttttattaaagtaaaggcagtcggagagctggatacaaaataaagcccacttggtcactagcgaacgaagcgaaattcacattaaaccggtatatgagccagtgccatcgtgcactggctcatgccgcctacttgtcgttattgtttctcgtcatcttgtttttccaatcggtctagtttggccaacacttgatccagttttttgtcgatatcttcaatttctgggccaaagccttggcgcatttcaagttctcgtaaacgagagcggctctcaagatagttggtaatgactggtaccaaaattgcggcaagggggatgagtatccaccatggaattgtcattgtttcgcctcctcataaaacacagttgacttagttacgggtggtagctagtaaaagattcggttacttgataaaataggaaaaattgtgctacatccatgaggaggccattatgggggaacaggaaaaaaagcaaacagttaaatcaacggctgattgggtgagggaccaattattaacagagtcaacgggccatgattggtaccatattgagcgcgtcacagaaatggctaaagcgattgccgcagaagagggcgctgacctgtttgtggtagaaatggcagcactgcttcatgatttagcagacgacaaacttgtggcgagtgaagaggaaggcatacaggaaatcaataactggcttgtagataggtcagtggaaaaagccgattcagctcatattattgaaatcattgagacgatttcttttagcaaaggcaagccgttgcgtacgttagaagcaaaagtcgtccaagatgcagaccgccttgatgcgattggtgcaatcggcattgcccgcacgttccaatatgcaggcgcaaaagggcatgttctatatgatccaaaagcaaacgtgcggacagagatgacgaaagccgaatatcggagtggacagggatcagccattcaccatttttatgaaaaactgcttttgttgaaagaccgaatgaatacacatacaggtaagaaattggctgaatcacggcatgcgtttatggaacagtttttaaaacgcttttatgcagaatgggatggaaacggctaagaaaggtcttttcagcaacgtgtatttatgttagtgtgtttgtactaggagagatgctgcatgttttccgttatcgctaatcaaaacaaacaacatcatatgaattagccttgctagttgatttttaaaaaatcatacataggaaggctattttgcataaccgcatggattcgttttgaaaggtggatcccatgcggtttttttgttttaaaaaaaggaggcaaattaaatgaagaaatgggattatcaaaatgtacgtggcacacaggattatttgcctgaagatgaaagtgtccgtgtttggctgcgcagagagctggaagaagtgtttcagcagtatggatgcaagccaatggaaacgccaatgatcaattacaccgacttgcttgcttcaaaatacggcggaggggcagaaattaaaaaagaaatgtatacgttgacagatcgcggcaaacgagcattggcgctccgctatgatttaacaattccgtttgcaaaagtgatggcgatgaatccggacattcgcaagccgtttaaacgctatgagatcggcaaagtgtttcgagatggcccgattaaagcagggcgtttccgtgagtttacccagtgcgatgttgacgtagctggtgtcgattctccattggcagaagcagaactattagagatggcgaccgaagtgttccggcggatcgggctaaacatgaccatccagtacaataatcgcaagctgttgacagggatgttggacatttgcggagttagcaaagatcaacatagtgctgttatattgatacttgataaacgagaaaaaatcggtgataaacaagtggtaaacgaattaaaggaaatgggcgttgacgggaaagcgattagcaaaattgcacaatggttaaagcaaatgagccaaagtggaattgtcgattttgccaccgaccatcccactacaccgataatggctgaagggatagcagagctgcaagaattagaagaagcgcttcgctacttaaacattgatagccaatgtacgtttaatccttttttagctagaggccttgaaatttatacaggcactgtatatgaattgtttttgacagagggggcgatccaatcaagtgtgggcagcggcggccgttatgaccaagcgatcagcggtttaactggcgaggaacagcctataccgacagtcgggatctcgtttggcattgatgtcatttacacagctttaaagatggaggggcgtattaaccaaaagccgttactcgattactacgttattccattgcagaaacaaaaagaagcgcttgctgtcgcttcttcattgcggaaacaaggctttcgtgtagacgtagagttcaaaaacaaaaaacttactaaagcgctggatagagcaaacaaagaaaagattccatttgtgattcttattggagaagaggaagtggcttcgggccattataagcttaaaaacatggagactggcgccgaacaacacgttcctttctctttttagaaacactggttgccgctgcttttgttcgacaacgccataaaaatctttgctgggggattggcatcggtgctcggctttacccggtccctttcccttcttttgatcccttcctgttgctttgctgtctgttcgtctgctcccgttcctttaaataatcagagcgttcaccataatagagtaaatcgaaaatggcacgcccattggtcggttgcccatcaggcaaataaacagggatcacatcgaaaaagacaaaatagaaaatgtagaataaaaatgtttggaaaaacatattgtttggcaaaacctcagcagcaataaaggcattgattgaaaagccaactatcatacatgtcaggattggcgacgcatacataaagccatgccaaaaacgtctgtttgtttttagttcgtcgtactccatccaactgtacatgaaaaaatagcggcgaacttcaatcgtagacaaggaaaaaagtttagggccgttaccaatgactagttttttcttggtagcgccaaggagaatggctacgaggtaatagcctgattcacgaataatggtcgccagaggcaaaatgatcagcaccgacatcaaaagttgcaggaagtcggacaagccaaacatagacagtcctcctttcatatagatccatacccgttttcattcagattgaacgtccgactttcgctaattgaaaaaaacgcggtgaacacacttggcgttcaccgcgtttgatcttgtctttattttctgaagaggcgaaggataagactaacaatcgccactaatatgatagcgcctaataacgctggcaaaatcgcaaagttgccaagcgtagggccccaactaccaaaaatggcagctccgatatttgcgccaataaagccggcaataatgttgccgataataccgaatggtatgtctcttcctgtaatggctccagctgcccagccaattaaaccaccgacaattaagttccaaataatactcatgcgattcactccaatcattagcagtacggttttagtattcccggctttttaaaaataaaacctatgctatcatgaaaagaagcaaggctgggcggcatcgataaaaaatggacgacaacgaggaaacatatatggtagttggaaacgctttctcaaaaaggcgagacacgtcagggctatcgtttagtcgcgttgtgaaagataaacggtgcagaggaaggcgataaagctgtcttgcctgccaccattgtgaaaacgcgtatacgataacatgttcaagtgatgaattcatgggcaaaactgggaggaataaggcatctctttcttttcctctttcgccatcatttcttggagcaatatgctttcttgtgcggttaattcgcggcataagcgtttttcaaaatcctgttttaaggcgagaaaacgtgctgctaaatcttcagacataatggaaccccttttctcatagccgtgttcctctcctattttaccattaacaaagtgttaagacaattagtgaacgaaagcttttaagaaagagaagggtctgataaggaggacatgatggccaaactaaccaaaaaagcaaaagcggccatacgggcaaaatcaatcgaaacactgtttcagtgtccatattgtcaattagacatgcatgtcgagcatgaggcaagtttcatttgtaagcaaaaacatacatttgactttgcaaagcaagggcacctctatttgctgactggacaaaaaagaaaaccaagccaatataacacatccctttttgaggcgcgccaacaaatcattatggaaagcgggctgtttgaccgtttccatgccaagatgaggaaactcctggcgggaacgacgggcactgtcgtcgatcttggctgtggggagggctctcatttaaagtcgattgtcaacgaggaggcaacggtagcgattgggcttgacattgcgaaagaagggattgtacaagcggcaaaatcgtatgaaggaattctttggcttgtaggcgatttggcgtatagcccttttaaagcacactcgatggatgtaattttaacgatcctgtctccttctaactacaaggaatacaaacgcctgcttgcgcctggaggtaatgtggttaaagttgtaccacaaagagggtatttgcaggagttacggacatttttttatgcaggccaggaaaaagaaacgtattcaaacgaagagatgatttctttgttcaaacagcattttcgtgaaacgactattaagacgatcacatattctgcaatgattaaaaaaagtgatttgcctgctttattgaagatgacgcctcttacctggaaagcacagaatgaaagaaaaatagcctttcttgaccaagatgtgatggacgtaaccattgattttgctgttttgatcggcaaggagccgaggatacattaaagagcttgtttttttatggatgtcagtggaagtgccagagctgtcgttttggtgatgcatagaagaggaggaactatgcaaattcgtgctgcttgtaaaaacgatatagaaggaatcgccaaagtccatgtagacagttggcaagaaacgtataaaggcatcattccagatcagttcttagaaagcctcacgtacgaatcaagggaaaaaggatggaaagagcttgttgctgatccaaggcaagatattttagtggtggaaaataacgagggtaagatcgttggttttgttagtggcgcgatacaggaagacaaacgccctcttgtcggggaattgaaggcgatttatttgttgaaaaaagactgcgggaaagggattggtcggcagttagttaggctgcttttcagccgattgaaggcaaaaggctgtgaaacgatatatgtggaagtccttgccgaaaatgatgcttgccgtttttatgaaaaactcaacgcgaaatggcatgcaacgacttcaattgccattgccggcaaacttctgcgcttatatgtgtataaatgggagggcgtcgatttggagatttagtgctctttttttatggagtgttcatgcatatgcaactaacctgaagctggccagatgattgatggccagcttttggcgttaaagaagggagtaagaaatgagaaaatggagcacagctgtctcttttcctagattgatgtaagcatgagggcggtcgcctttgaaatggatcgagtcataggctgacaaatggtggctttccccctcgacttcaatcgtcagttgtccagccataaccgttaccgtttcgactacgccaaggcggtgcgcttctgattcatagcggcattgaggctgcaaataaccacgatagcattccatcagcccttgtgagcgaaacaacggctcaacgatgaactcgtcatctgagctggagagtttcatcgccttgttggcccgagcgatagccacatcagcttcaaatgagagcaaggcagtaatcggaatatgaagtccgttggcgattttccaaatgacagatagagtcgggttgccttccccttgttcaatttttagcaatgtcagtttgctaacaccaatttgtttggcaagtgcctcgatgcttattcctttgcttgtccgcaattgccgtaggtttttcccaatttgtttgccggcttcttgattttcggcaagctcttctttcgccaattggatcactcctttctcaaacatgtaatagataaatgaatgaacaatatggtatattataatataccatattgtaattttaaatatacatgggggtgtgacaatggttggccgaaaacaaataacgcaagcagcgatcaccgaagcgtttcctcttgcgcttgcaattgctgcgtatggcatttcttatggagtgcttgctacacaaggtgggtttacattcgggcaaacagtgacgatgtcgatgtttgttttttccggatcggcgcaacttgtaacagctggtatgatggcaggcggcgcaagtgcgatcagcatactagctgcagtgttgctattaaatttgcgcaatttgttatatggcgctgccttagccaacacggtatcattagcaggaaaatggcgctttgcccttgcttttggtgtgtcagacgaaccgtttgtgcttgcaagcgccagggaacaaaaacatgggccggaccctttttattttgcgatcgtgtttgtttgcttttacttgtcttgggtatttgcttctttggctggcgcacttctcggcgcccaagtcgacccactcacctgggggctcgatttcgtctttcctgtaacgtttacagcattgcttgtcccttcgttaaagggccgtccagcgatggccacagcccttgcggcgattggcatttgcctgctgttccactattctggcttccgcgaagaactaatcgtgattgcggcgggcatgctcgctcccctagcagggctaatggttggggggaggaagagcgatggacaataactggccgttaattataggaatcgctgtcattacttatctgtctcgcattgctggcatcgaactgatggccaagcgtccgttgccgccaaaattacaaacgttttttcgttatgtccctattgcgatgatggcagcgttaattgccaaccaaatcgtttcctcagaagtcggacggatgagcctgtcttatccaatgctatttggttgtattgcttgtgccgttgttcttcaattaaggaagcgctttttgcttgcagtcgtggctggcgtcctagtcgggatggctgcccgttatctgctacatcatttatagcatccaaattttgcttttgcaaagcattaggtaagcgccatcgcttcaggcactggaggcttcataacggatgcattattcctttttaaaaaaggacaacatttgacggcaataattgaaagcgttatcatcgtggtgcaactttcttattatttaccaaaaaggagtggacgccatgcagagaatagtcatgctgctaggaatggctttactgattgctctaggaggatgcagtcaggagacagaccaggcggtggataagccttcagaagaaatcactgtctgggcttggaatttagaagcggaatatttaaaagatatcgtcccagcttttgaagaaaagtatcctgatattaaggtaaatgtgttaaagttgagcgctgaccaagtttaccaacggctgacgacagggctggctgcaggaatagaaagccaattgcctgacttggtccaggtcgaaaaccagcgcattgatttgtatatggaccggtttcgtgaaagttttgtcgatttatcagaaatgggctttgatgaacatcgcgataaatttgttgaaggaaaaatcgcgccattaatgaacgaggatggcggcgtcatggcgtttccccgggatataggaccgatggctgtcttttatcgcgctgatttgtttgaagaagcaggcattgacccagccgacataaaaacatggaatgattacgtagaagcgggcgtgaccatgcatgaacaaactgggacgctgatgacaggcatccagcttaaccacgacacgtcgttttaccgtgcgatgctccagcagcatgaactgttctattttgacttagaaggcaatgttgctgccaataccgaggcggcgcaccgctcaatggaaatgctcaaaaaaatggacgacgcaggcattttgcttcatgctgctacagcagaagaaattaacgcagccattaaaaacgacgcggtcgcttcggtcataagcggttcttggcaaaagggaatcattgaggatcaaatgcctgagcaagaagggttatggcgggtcatgaaaaagcctgcttttgaagaagatggtttgaccgctgctaatgacggtggttccaacttggcgatcacatcggtatcaagcaacaaagaggcggcctatttatttggcgaatttgcttctgtcgatgtcgaaaatcagctttatggcgcaatggaatacggagcttatcctgccttaatagatgcgattgagcggcctgaactggatgagggcatcccgttttacggtgggcaaaaaatcttttcgatttttgcggaagaggcggttgatttgcctgttgtcaattttacaagcgactttttacgtgccagggaaacgtataacgatgcgatcgggcgtgtcgtcctccaagatgtgcctgttgaggaagcgcttgagacagcagccaacaggcttgaagccagcacaggacggggggctagcaatgagtaatccagcattgtcaaaaggaacaaagcacataaaagggaaaaaggcatcaacaggactagcgccttatgttttcattgcgcccgctgcgattttgtttatcatctttaccggctacccggttatttactcgtttgtgctcagttttacggtaaacgagaacggcgttaacacgtttgctggtcttagcaattacattcgcttgttccaagatagtttgttttatgaagcgctttttaatacgtttattattttgcttgtacaagtgcctgtaatgatttgtatggccgttatactggcgaacgtgctccacagtggtatccgccgttttaaagggcctctccgcgtagcgttttttacgccgacagtcacatcgttagtagcgacagcggttatttttctgctgattttaaaccaagacttcggcatcatcaactatgtgctaacaagtgttggtatagagcggatcccttggctaaacgatccgttttgggccaaagtatctgtcattcttacgattctttggcggtggaccggttataatatggtaattattcttgctgggctgcaagtcattccgaaagacctgtatgaagccgccgaaatagatggggcaagcaccataaaaaagtttttctcgattaccgttccccaattgaaaccggtgcttttgtttgcttttgtcatgtcgacgatcggaacattccaactgtttgatgaagtgtttattttgactggaggcggtccgataaatgcaacgatgacggtgacgatgtatttatacgaaaatggctttgagtattttgactttggctatgcatcagcaattgcctacgtcattgtcattattattgccttcttgtccttcatccagtttaaagtggcaggtgatcgtgaatgaaatggatcggaaaactaggcaaatatgtagtgctggcagctggcttgtttattacgcttggaccattctactggatggttgtaggagcgaccaattcatctggggcattgctatcggtgccaccgaacgtgataccagggacacatttgctagaaaacgcacgcaatctcttaaacaacatcgatattttccgagccttgtggaactcgattttcataacggtcacatttacagttatcgctgggctgtttagtgcagcggcagggtatgcatttgccaaatatgaatttaaaggcaagaatgctatattttcgatgtttcttgtatcaatgatgattccgtatcaagcattgatcatcccgcaattcgagctgtttgcgcgaatgggtatccttaattcctatagcgcgatcatcctgccccagcttgcctatccgtttgcgatctttttaatgcggcaaagcatgaagtcgatccctgattcggtactggaatcggcacgaatcgacgggtgcggcgagtaccggatgtttttccaaatcgcgttgccgacgatgttgcctgccattggcgctgtaggtattttcttgttcacccatcaatggaacaactttctgtggcctttagtcgtcattgtcactgaagatatgtatacgctaccaatcgtcttgtcgattttaggcggacaagacaacttggattacggccaacttatgctcgccgctactatttctgttttgccgatttttatcatgttcttgtttttgcaacggtacttcattgcaggaatatcaagtggggctgtaaaagagtaacttatagaagcaagcggggattcggggaacgggtgcccgcttttttgaagcgctttgccgaaaaagtcgatggtgtattcacggaacgaacgttctatttatgatatgctgaacagaacataaggagatggtagccaaaatgtcgaatttagtacaaggcccgtaggagcttaattcccagctacgcaaaaaggagtgagcaaaatgccaatgaagttaaaagcgccgactttgccggtgcagtttgaggaaagtgactttgcaacacaacttgaagaagaagaaccgtttttaatgaatagggcctttaatggggaagaaaaggctgctttgcacgtagagaaactaaccgtttcgaaatcgatcgttaagcaaagcaaatttttacatagtgctttcccaaaagccgattttacagatgttgtgttcgaacggtgtgatttttccaattgtacgtttcatggggcaatttttcatcgtgtccaatttataggctgcaaattgactggggcagccttttctgaagcgaatcttggccatgtggcgtttcaagattgcttagtaaatttaaccgattttgttgaagcccgtttaaaacatgtcgcttttcgccagtgttccctggaagcggccaacttttccgattgcctgttaaagccagtcgaactgaatgaatgcagtattgacgacattcattttgggcaaacactgttagacgggttggacataagtacgtgtacatacaaccgcattcaaacgtctcttgcgcaactggatggccttaccatctcaaaagcgcaagcagttggatttgcgaaattgcttggcttaaaaatcaaagacgagtaggtgggagaaatgctcagaaaaaggagcacagcgcaaaaaaacgcctaattggctctttagtttgcttacaatcactggtacactaaaaaggtcaaatgaattttaatgttggaggggtagaatggggaaacgtatccttttgtttatcgggacaaatatcttggtcttgacaacaattatggtcgtttggacgttggttacatcgtttacaggcatagacggttcgtttgtaagcagcagtggcgcaattcaatttgttccgatcctaatctttagtctcattgtcgggttctcaggctcgtttatttcgctagcgatgtcgcgctggattgcgaaaaaaatgatgaaagtccaggtgcttgatccagatgggccgctcaatgctgaacagaaagcgattgttgaaaaagtgcaccgtttgtcgagggcggcagggctgacacatatgccggaagtcgggatttaccaatcggcggaagtcaatgcttttgcaacaggcccatctaaaaaacgttctcttgtcgccgtatccactggcttgttagacgtgatggatgacgatgcagtcgaaggggtcatcgcccatgaagtcgcccacgtcgccaatggagatatggtgacgatgacgttgctgcaagggattgtgaacacatttgttgtctttttgtcccgtgttttagcgatcgttgtctcacggtttgtgaagcctgaacttcagtttattgtgcaattcctggccattattatattgcaaatcttgttctctatccttggcagccttgttgtcaacgcatactcacgttatcgtgaatatcacgcagacagaggcggcgctgatttggctgggaaagataaaatggttcatgccttacaggcgctaaaaaattatgtggaccgagcgaaagccaatgaccacacagatgatacagctgtacagacgatgaaaattagtggcggtaactccatgctaaaactattttcaacacaccctgatttaaatgaccgaatcgcccgtctacaagagcggtaggtgaaaaaagcccatttgggcttttttatttatcggtattcgattatcgtatacaattacctaatattaaccataaaccggatgacaggatgaaatccgatagaaacctctcctcattcaaaacttgtctaaaccccctttatatagaaaagcgtataaaaataatatgcgttaacgattgacgtttacgttgcgtaatgctttatagtagcagttgaaggaggtgcaaaaaaggtggatatgaaaaaacgattaaacctatggtttgaggagaaagaggtcggcaactgttgaggagatcaacctgtcaacaaaatgaagtctaaattagagagcatgactaaagatgaacataaatatttatctgaaaagtgggaaatcattttcaataaacttgggaatccttcgtaaatctcccaagtctaaagaaggacaagcaaccattcaagaatggcatgactttttaaatgaaaccctgatgccttttgtggattgggtcaactctatatgaacgatttaccaaaaacattgatcaatatagttatcgattagctcattttatgagcgagcaatgaacgtctatttagataatcaaaaataacaaaggtggtagcaatgaaaatagtcattgaaaatacaatcgagcaatatgaaaaattattctctatgaaggaagaaaaagaaaactactttcgatactccatgatggcgcctttcgaaaaaatgtggaatgccattaatgttcctttaaaagccaatcaaccaaatggatatgacgtaatcatggctacaaaaatgcttgggtatcttgatataacggaaaccgaaatgggaaagggcgcgttagagcatttaagggaggttcaagctcttcaaacggcatatgataccttgaatcactgtgtagagtttatacaggagaataagttaaaaataactactgacgaattgaaatttggaatgtatatagctgatccgaaaaagctcgaattacaaaaaggttattgtggctttgggggaattccaggatttattcaagtctcaattttccctagctcctataatgttcctaaaatccctgctgtgattgcccatgaatttcatcataatctccgtttttcttattttgattgggatcatgggaacgttacagttggagattacctaattatagagggtttagcagagtcatttgcaaaagagctttatggagaagaccttttaggtccttgggttacttcttttgataaagaggacttagaatactcaactgaaataataaaagatgcattaactgttaaaggatttgcagaggtcagcagttatatgtttggcgacaccattgcaaaagaacaggggtatcaacctgttgggttatcaccatttgcgggatatgcagtaggataccaagcagtacagtccttcatgaaggacaataatgtggagataggagaagctaccttactaagtgcagaggaaatactaaacaattgtggactgttttcctaactatgaatggtttaacagcaattcctaaattcttattggaaaataattgataccataaaggaaatgaaataatgactcccaatatgctcaacctaccaagttttaagcttgataaatatgatgatatgaatatttacttcctggcctattgggatacttttaacaatgttaataggacgcatttgtctggtgatgtcgacgacaacggtaacacactgcactgagaagtccgttgattgctattgtcgccgacacagcagtatatacgggtactagccatcgataacgctgttcgcaatcgcttctgccactgtttgtcgataattggcatccgcaagttggctcgcgtcgtcagcattcgacacaaagcctgtttccactagaatagctggcatggttgtatggctaatgacataaaagctttcctcaaaaatgccacggtcggttcgatctgtgtgttcaactaattggttttggacattagcggccatatgcttgcctgctgcacttcccgggaaataataagtttcgacaccatttgcagctgggttagagaacccatttgcatgtatgctaataaactggtcagctccccaagcgtttgccattgctgttctctcttctaagctgacaaatacatcttcgtctcgtgtcatcaatacggcaaagccagcattttctaaaatgtcacgtgttcgtttgccgatatccaatacaatttctttttccattaaaccgttcgctacagctccgctatctttccccccgtgcccagggtccaacacaatccgttcattgtttaacgggacactgtcatgtttggtgctgctccggtcgacaggttctccatcgtgattggtaatataatgaaggctgatataaccactgccgtcgactagctcgccccaaccatcaccgttgtcggtatacgccacttgttcgccaggtgtcagcgatccgacaacttcgtggctcgtgctcggtccgctacggacatttaaagaagtttgtgtatcgacttctcctgtttttgctgctatggcatgcacatcttcagaaatcacaactgaagaaagcgcgaatacgataaaaaagaaaagacaaagtgtcatttgattgcatttcataaaaaatacctcctgtctaagtcaccctgccttagcagtctagccatctagtagaaaaaataaacagattcatagaaagaaagcgcaggaagttggctaaaaatacgctttttatgggtaaaacagcgcgtatcgggcagaatgaaaaaataaaggaaagggaagagtgcccatggaaccatcattgcgaatgattacattgcctgtctgcaacttaaaacgggcactaagtttttatgaaaaggcattgccgtttcaaccagtaaaaaagacaattcagccagatactacgcatgtggcgctcaaagtaaaagatggcctaggccttgtcctcatgcttagatcggaagtttcccgaatttacggcataaccgaaaaagcgaacaatagcacgattttaacgatggcctgcgagtcagatgaagaagtcgatgctgcttttgccaatgtcgccgcaacctctgcacacttcattcacccgctccagcgcgatgaatggtcttactcatttgttttttcagatccagacggaaacttatgggaagtgattcatatagagcacctttagcccgctaagcaagcgggctttttttgtggagtgaagaaaaaaaacacggccaatggccgtgtataataattagtcaagaaagcggagtagatcgccaagtaaaatttcatcagagagcgacaactgctctcggacaatttctttatctttggcacagtatgtttcctctacaggctgttcagttttacggtcataacaagtatggtctgcatacaaatactcctcagacacaaatcggccatcgcgaaagataatcggcacgtcgctagggcgggtgaacaagtcgtagctaaacgttaagttttcattggcagaaaggcctaagagttgaagcagtgtcgcatgaatatcgatttgtccaccttcggtttcaatcgtttgtccagtttgcccaggaatatggataatgagtggtactttttgcaagtccaaatgagttagtgtgttttcttcttggtcaagcaacgtgtgaacgccgctttcatattggcgggaaatcccgtaatggtcgccgtataacaagaagatggtatcttcataatggccttcttttttgagatcggcaaaaaattgctcaatcgcttcatcttgatagcgaatggtcgtcacatagcgattgacgacatcgactcctgtatcagcaggatcaattgattggtcctcttgttcaagcaagaacgggaaatggttcgtcaaagggataaatttagccatatatggcgattccaacgtgttaagatggtcaatcgattgggcaaaaaagggtttgtctttcagcccatagttgacactcaactcatctgttacctcataatcgtcttttgagaaaaactcgtcatatcctagcgtttcatacatcgcttcacggttccaaaaagtcgcgtcattggcgtggaaagcggccgatgtatacccttgttctttcaagatctgaggaagggagcgaaatgtattttcataacggcgcacaaaggccgagccactggaaagcgggtaaaagccggtatcgagcataaactccatatccgatgacttgccttgtgcggtttggtcataaatgtttggaaaataaaagctctcttcaatcaattggtttaagaacggcgtcagttcttcgccatttaccgtttgcccgataacgaaattttgcgtggactcaaggctaatcattacgatattttttccttgggcgagcccaaaaacatccacgtcaggagaaggtttttcctgcatttccgcttttatgtcagaagcggttgcttcgttggcccacgattctttcagcggcgcactaatgccttgagcgagattgaccaattgataattataaaggccaagagacgcgacaagttcatctctagcgtagtcggtcttaagcaaatacggattttgaatatggctgacacctagtgccaccacgagcgccaccaaacctgaccaggcaaatccttttccgcgtgggcgctcgattgagcgtcgttctattttggcactaatggtgaaccaagcaacgacaaataagtcgatgagcaataacaaatcataaggtgaaacgagctcggctgtactggatccgagtccacccacattgctgaattgcaggaagacggacacggtcagaaaatcaatgtaaaaccggtagtataaaagcgtcccaaacaacaacgctgtgcataagagataaacaagcaaaaacacgagcgggcgaacatgcttgctaaagtaaaaactaaagccaagcaagagcataagcgaaccgagagggccgatcagcaacaaaaagacgtcgacgccattttggataggcaacgaaaaagccgttgccgacacaatcacggttttcaaccaaagtgcaacaacacctaaaggaataagatgttttgctaaaaaatgtttaagttcattcataactgcggaccgcctgttcttgtttcatttttgcataaatggtagtaatggtttgaactgcttttttggcaaggcgagcgtcgatgtggcccattaatgctagctggaaccaattgcgttcaagtaaataggcgctttcataactgacatgaatgccgtgttgtttgagacggtcgccaaatgcccttgcagacaagtggccagaaaggtcaacggtaatgatagcaggagaaaaagactcgccgcgcactactgtaaagccattcgcttctagtatagccaatatggactcacataaagaaacatatggcggagccggatggtttagtgcttcatttaatgcatacaagccatttgaacaatgggtaaacggtacactttctgcttgttcatatgtgccaatgtcaaggtaggcaggcaacgaatcattggcgaaagctggctcgtcatggaagacaagggcaagtccgggataagctgccaatcctttgccgctgactgaactagcaagccagacgccagataagtcaactggaacagagccgatgctgctgcatgcgtcaaggcataaacgaacgccatgtttgctgcaaatctctttaaggcggtcaagagcataaaggcggcccgtcgacgtttcacaatggacagtccaaagccagccaatctcagaatcggcctctagccatttctcaatgttttcgtaagggaccgggccagtttgggaatgggccaattggtcaaatgataatccccaccgctctgcttgtttgactaaccgctcgccaaattcaccgcttgtgagaatgacacctttttgatgtagcgttgacagttgagctgctaccatctcattggcaagtgtccctgtcccgaccgcaagttccacataacggccatttgttagctggagcaacttttctttcgtttgtgccatcgcgtgatggaattcttcggcccggtgggatacaggagcctttgcccaagcctcttgcacggctttcagttgtgtgacgggccccggcaaaaacaactgctggacaggcgcttgctgccgttccattaacttttgaaacgctttggttgaagctttaaaattttcttctgttaaatacatcggttggtaacgggcttccccagacccgacaaggggtccaaacggcacaaagccaatccgcttataaagctttaattgccgtgttgtacctgagataagggccatcgtatatccttgttttagacaataagaaacgagttgctcgcagaggcggtaaaaaacaacccctttgcggtatgcttgtttaatggaaagcagcctaatttcgcatagcttttcatcgctgtttatgtaagagtcaaggttctctaatttactgtctaacgaaaatgggcgcgtgtcgcgaacggaaatcatgccgataatttcttggccgcgcttggcaattatataaatgttttcgtcattaaagcggtcaatgagcctcttatctgtatttgggcgatgctgtgggatctcttcgacaaatgtgtcgtaatttagcgtatgaatttgatcgaattcttcatctaaatcagcaatcttgtatgtaatggcagatgtgtccatctcaatgcccctttctgtgagcaactagcacaatcatgagcaaaagcgcaaacaagccagcaaggctgtatgcagtttggcaaagcaatgtgagtgggattgtacaaatggcaatgaagcccgcctccgtaaacgatcgtttgcaagcgcgcaaaacagcaagtgctaggccacatacgactaaagcaaggggggcaagcacaagcgcagccgccaaataaacgacgactccttttccacctgagcgctgcaactgcagcggccaaatatggccaatgagtatggccaaagccattgcaccaataacgatctcagaaacgtctagccatattcgccctatggccaatggaatgattgttttgaacgcatcgatgacgactgtgccaataaacgctttttttccaaaaatacgtccagcatttcgagccccagcgttcgtgctccccaaagtgcgaatatcttgtttgtatttcatatgtccgatatagtaagccccgtttatacagccacatgcataagatacggcaacgagtaggaaaaatgacatggaatcgcccttttatagagaagatagtaatttttaccgttttatcatatcacactctatgaaaaggattaagaacctttctaaaagatagaaggattttcggaagcagaaaaggaagatggtccccttgcaaaaagtttcaaaagaaataccaaacgacgaaaatgggcccttaatggtttgaaagaaaagacaaccaattagctcaacggatatgttacacttgagcaaaggagggagcttttaatgctatacttaagcgtaagactgaaatgaacctaaccctaaatgatcacatttgttgacaacatcaattaagatcatttaggaggacatgaatatgatggaaacgatcaaacaagtagcgaaagaaacggcaaaagcggaaacgtttgccggcacgtattatgtagtgactccagaaggtatcgtcacagacagttttggctttgccaaccgagccgaacgcatcccgaaccaaacaaatacacgctatggcattgcatcaggcacaaagttgctaacggcgatggcgatttgccaactagcggactcaggaaagttatcgttgcatgcgaaattggctgattgtttagaaatcgattttttagcgatagaccctgaaataacggtgcaccagctgttaactcatacttctggcattgctgattattttgatgaagaggtcatggacgactatgaggagctttggcagcaaacgcctgtttaccagatgaggaaggggaaagactttttgccgcttttccaacaacaagaaatgaaagagaagccaggaacgacattccggtacaacaattctggctacattgttcttggccttgtcgttgaacaggcaagcgggctttcctttagcgactatgtagaaaaggcgatttttaaaaaagcaggcatgccaagatccggttttttcgaaatggatgctttgccagaaggcgctgcgcttggttacattgacgaagataatggcaaatggcgcacaaatgtattttctgttccagctaaaggaggcgccgacgggggcgcttttgtgacagcaccagaaatggcgaggctgtggcaagagttaagcgcaggcaagctaatgtctaaggaaatggtcgcgtcgctattagcgccccatgtacaagtcgaagacgatcttttttacggctatggcggatacatgaagggcgaagctggttgcgtatacaaacatatctttatgggctatgatccaggagtcaatttccgaatggcttgttaccctgaaacagggcatgtgctcgttgtatgttcgaacaactctgacggtgcattcgagctgcaaacggcgattgaaaccgcgctcttcacataagagccaatgaggttctctccgtgttcaggcattgtttgaaagcgacaaaaagccaacggctgaagctcgcttgcaatatgcaacaaacatagattttcgaaagaaaccccttcccgctaaatagggggagggtttcttaggtagcgggaggaagaaagatgaaacaggtacaagtatggcattatgaagcattcagtagacacaaagggaaaggaaatccagctggcgttgtttttgaaggagatgcgttagcagaaagaaacatgcaagaaattgctaagaaagttggctttaacgagacagcttttgttcttcactctgatgtggcagatttacgcttgcgctatttcacgccaggacatgaaatggatttgtgcggccacggtacggttgccgcattgcaagcactcgtcgaggcgggaacgattgataagcaaacaaaacttacgctcgaaacaaaagcgggcattttgaacattgagctggaaactaaggaagggctgttaatgattgcaatggaacaggcagcccctcaatttgaacgcttcaatggctcagctgctaaactggcggaagcacttggcttgtcttcatctgatttggacgaccaactgccgattatgtatggcagcacaggcacttggacgcttcttgtgccgataaaaagcattcacgctttttcgcaaatgaacccgcaaaaccctgaatttccagcaattttaacagaaaagccccgttgttcagtccaccccttctgtgtggaaacgatagacccagacgccgatctccatggccgccacttttcatccccatattcaggcacgatcgaagacccagtcacggggacggcatctggtgtaatgggcgcttacgccacaacgtatattgacaacggcaaacaagagtggcttgtcgagcaaggacaagaaatcggcaaaaatggccgcgttcttgtcgtggttcagacggacaacaacggcaagccccatgtctcgattaaaggggaaggcgtttatgttggtagcttaatggtggaaattggcgaatagcgctaaacaagggaacttcgctctattcaactaacgttctcgctgacactaccacgttttctgcccatcctttcatctcggcagcgcttgatcaagcgaaagtcgtccaaaccattgatggcgatggctggaaatgaagcgatacgctgccgttccaacgatctctaccaaggaaaaggaaagcaacggagtgagccaggctagtgctggcaggcgggagagaatttggcgtatagcttggaaaccaatccagacttggccttcttttgacaggacatagatttcgtcatacatgtctacatagcgtgctgctttttgtcgtgttgtttcgcttacggactggacagggaaccagcgaagttccctgttccagtctagtttcataacgacttttttcatggctcggcacaacgggcattgggcgtcataaaagacaatatcggttttcatgtccactcacctcaacaaccgtattgccgaaaaccgtccaagttaaacacattagacgggttgcgggctttttaagaaaacacggcgcccttctgtggccgattgcagcgcagcttcattgatttgcgttaaacggagcatatcctctcgtgtaatatgcggctttttgccatctttgatttccgcaacccattgggcgatggcgcttggtcccggctctggtagtgtcggcgtttgccaagacccgtcgccaagttggctggagcggatgcggactgagcggtcttcaacgagcaaactgccttctgtaccatgcaactcaagcaaaaatgggctggaactgccaataaagccggcttcgataataccgcttgcgccagaatcatagcggacgatgactgaggcatggtcatcgacttcacgcccggtgaacgaaaccatttcgcacatgacagacgctgcttcgccagcaaggcggtttgttaaataaatcggatgggcgcctaagtcgattaaggcgccgcctccgcattggtttttgtcatagaagtgaggaggcagccacccgtctcgatgcgtgtctgttggcaaagcgccgccatgttcaagccgacaacggatcgatgtcaattggccaagccagccgttgtcaagtgcttgttgcgcataaatgtaagacgggtcatttaaacgaggcaatgacagcattaacgagacattgtttttatctacagcttcaaagatagcaatacagtcttcttctgtaagcgctaacactttttcagaaaaaatatgcttttttgcagcggcacaagcaagaattacctctttgtgcatggaagtaggcgtgtcgacaatcaccccgtcgatttgatcttgggcaagcaattcatttaaatcttcgaaaaaatcaacctctaacgccttcgcccactgccttccccgttctcgttcttcatcccagacagcaacgacagacaaattagggttctccagtgcttggctggcataatcattggcatgaacatgccagcggcttaacaatgcaacttgaatcattgtactcctcctcagcagttattaaagtccatactagagagtgagtgaattgctgtcaagacaaaaaagtttcatttttatcaaacacgctttgttggagacgttttttaaagcgtaaaggtgagaggtgcttagcttgtttaaaatgctggataaaatagcttgtgctcgaatagccgacgctcacagctacctctgtaatgcttaaatcggtcgtcgttaacagtttctccgcttctgtaatgcgaatgtagtttagcagttcagtgaacgaacgcccggtaatgcttttaatttttcgagaaaaatagctgtagcttaaattgcaagtagctgctgcttgttttgctgtcaacgctgtagcgtagtggctttctaacaactggaacacttgccgcatgagctgaaaatcgctatcattgatcgattccgtcccaacagaaatgcctgattggcgccaatggcgtaaaaccgctaaaaaaatcgtgcagatgtgaatccggatcgcaaagtcatagccgtaatctttgtgtgaaaattcgtcattgatttttgcaatcgttgctggaatgacagtgctcgccatttccccgctttttagcagtgtttgtgggctagactttgacatcgtaaaaggaaacacgtacttagattcaaaaatggagcgagatgtagaatacaagacttcgggatccaatttaattacaaggtactcgaccttttcgccgctctctccccatattgcatggacttcgttagagttgattatcactaagtcgcctttctccatcaggaacggttgcccgctcacgaaaacacgggcgcgccctgaaaacgaatagagcagttcaattgcgtcatggaaatggggactagcaatccgtcggtttggttcgcttgtttgcatatggcagtggatcggctcccgaatgtcatttccacttggcaattgttctttgtaagcatctaattgcgtgaacatgctatctctccttatgacaaacatttaatataattgaatagttctagtatataatcaattgaggggaacatggtacgattttttcgaaagaattcagaaaacggtaaaggtggtgtgcgaacatggctcgaattggcttgcaattgtattccgttaaagaacggtgtgcggctgatttttttggcacattagacgaggtcgcgaggtcagggtatgaaggtgttgaatttgccggatattttggcaaaagcagcaaggaattaaaaaagaggttagcagataaccaactcgtggcggcggggagccatatatcgatcgaacaactaacaggtcagttggatgaagtgattgcttatgcaagcgaaattgaaagcccttacattatttgccctggcttgcctgagtcttatcgggacagcgccgatgcttataaacgtacaggggagctgttgacgaaaatcggcgaaaaggcagcagcggccaatattgcgttcggctatcacaaccatgacatcgaacttacccaatttgaaggcgaatacggacttgatctgttgtttgctgctgcggacccgcgttatctgtttatggagcttgatacgttttggttggaagcaacggggcagaagtcgattgactggattcaccgttacaaagaccggattaaaattttgcatatgaaagatatgaacaacctacaggaattgcgcaatgtcgaagtcggcagcggcatcatggatttccacgggattcatgcagccgcaaagcaacacggtgttgactggtacacggttgaacaagagcagtttgataaagatgagtttgactcgattaaagaaagcgcccaatttttgcattcattacgataaaaggagcgattgaaatggaagagcggacagtaagaattggcattataggctgcggaggcattgccaatggcaaacaaatgccgagtttggctaaagtgaaaggcgttgaaatggtggcgttttgtgacattgttaaagaaagggcagagaaagcggcggaaacgtacggcagcgaaggcgcgaatgtgtataccgattacaccgagctgttgaaggattcatcgattgaagtcatccatgtgtgtaccccgaataagtcccatgcgccgattagcattgcagcgatggaagcaggcaagcatgtgctgtgcgagaagccaatggcgaaaacggctgctgaagcacggcaaatggtggagacagcaaagcgcacaggcaaaaagctgacaatcggctatgacaaccgttaccgcaatgactccctttatttaaaggagcttgtggaacaaggcgagctaggcgacatttactttgcgaaagcacatgccgtgcggcgccgtgcggtaccgacttggggcgtttttttaaacgaggaggaacaagggggcggcccgttaattgacatcggtacccatgcccttgatttgacgttatggacgatgaataactacaacgttaaaagtgttgtcggcaatgtttactacaagctgtcgaatacagaaaatgcggccaatgcttttggcccgtgggatccaaaagagtttaccgttgaagattcggcatttgcctttattacgatggaaaatggcgcaacgattacattagaggcaagctgggccctcaatacgcttgatgtcgatgaagcgaaaacgacgttgtgtggcacgaaagcaggcgcagatatgcgtgacggcttgcggattaacggtgaaaaattaagccgcctatacgtaacgaagcctgacttaaacgctggcggagtcgcctattatgaaggcggggcggaaagccaagcagacaaggaagcgcgcctttggattgaggcgattcgcaacggcacggagccactcgtgaaagcggaacaagcgcttgttgtcagtgaaattttggaagcgatttatcaatcagcgaaaacaggcaaaaccatttattttgatgaggccaatgtacctgcgacgaccaattaatggaggtgccaatcatgtctattcgttttcgttccttgaaatgggtcggtcttttggcggcagtcgcgactgttcaaacggcatgcagcagcacagacacgggtacagaagagcttgaggaagaagtgattaccgtcgaaggacggacgacggtcacttattggcacaattatactggaaaaggactggaagccatcgaacaggtggcttctgactttaatgaaagccaggacgacatttttgtgcaaccgatttatagcgcctcttctgaaggagacgaccagcggcttttgacagcaattgctggcggcaatccacctgatcttgcccatttcgaccgtttcaaagtcgctcaatatgcggcagagaattcccttgaaccgctgacgccttttattgaagccgatcactacgatatggggatttattatgactatgctgttgaagaatcgacttacgagggcgacatttatgccatgccgctcacaaccgattcaaggctgcttttttacaataaagaccgctttatggaagtggggctagatcctgatcatccgccatcaacgattgatgaattagaagaggcgattgaaaagctctcaacgattgaagatgggcgcgtccaggagcttggtatggtgccatggacggcgcaagggtggttttacacgtgggcgtgggcattcggtggcaatttttacgaacctgagacaggcgagttgatgatcaatcatccgaaaaatattgaagcgctggaatggctcgtttcaattgccgacaagtatgacgcagcgacagtcacaagttttgacacggcccaaggaagcaatgagatggacccctttattcaagaaatttatagcatgaaagtcgatggcccgttctcgatctctaccattaatcaatacaatcctgatttaaattacggggtgacccctgtccctacgccaacaggcgacaattttgcgacctggtcaggagggatgtcgctgatcattccgaaaggagccaaacacgctgaagaggcgtgggaatttatgaaatattttggcagcgaacaaggacagcgtacgttcaacgaaatggatcaccaaatgtcggtgattgatacggtcaatgaagaactgtatggcgatgatccgattatgaaagaatttattgatattttgccggattcgaattcgcggcctccgattgcaagcgggcaattgctatggaacgagctcgacagggcagtggagtatgcgatccacggcagagatgagccccaggcgttgcttgacaaagtcgctaaaaaagtggccgaagaggaaaattaggagggtggaagatggcaaaattggaaacgggaaaggcaccgagcgtacgggtaagccgcaagcgttcgaatgaaagtttagctggttggctgtttgcgttgccttggatcattgggcttttgctttttttcgcataccctttgatttcttcaatatattacagttttacggattacagcattttgcaaagcggcaaatttattggcttggctaattaccgcgagttgtttcaagacgagttgttttggatttcgatttacaataccatttattttgctgttttattcgtgcccctgagcattatttttggcgtagctttggcgatggtgctgaatatgcgggtgcgtggcatggctgtgtaccggacgattttctttttgccgactcttgttccacatgttgcattagcaatcttatggatttggctgttaaatccacaattcgggttggtcaacgctgttctagactggttcggcatacaagggccgccttggcttggcagcacattttggtcaaaacctgcattgattttgatgtcgctctgggggattggacaggcagttatcatttacttggctggcctaagcgatatttcgcaagagtactatgaagcagcggaagtggatggcgcaagctttctgcaaaagacgttttatattacgctgccgttgttgacgcctgtgattttcttcaatttggtgatgggctttatcggcgcgtttcaacaattcacgctgccttatacgatgacacaaggttctggaagccctgctgattcattgacattttacgtcatgtatttgtatgacaacgcgtttagttatttccggatgggctatgcatcggcaatggcatggattttgtttgtcatcattatggcattgacggccatcgttttttggagttcaaaacgatgggtccattaccaaggcgattaggaggtgccgcatgaacacattggcaaaaaaacgattaaaaagcatctacgctcataccattttaattcttgcatcgattttgtttttagttccgtttgtgtggatggtgtctacttcttttaagccgattacgcaagtctttacgtttccgccagaatttttgccgcggcctttccaatgggagaattatattgaagcaacgaagtatattccgttttggacatacacatggaacactgccgttattacaggacttagcacactcggagtcgttctttcctgcccgcttgtagcctatagttttgcaaagctccgatggcgcggccgcaatacgttgtttgcgattacgattggcgtcatgatgatcccgactcaggtgacgatgattccgctcttcttgctttttaaccagttaggctgggtgggaacaaacttgccattgattgtgccagcttttttcggtatccctttttcgatttttctgttgcggcaattttttaaaggccttcctgacacattacgggaagctgcaaaaattgatggggccagcgaatggcgcatttattggcaaatcatgtttccattagccaagcctgctgtgttagcagtcgcgctgttccaatttatggcggcgtggactgattttcttggaccgcttatttacttgactgatgaagcggcctatacattgtcgctcgggctccagcaattccaaaaccagcaaggttctcagtggcatatgatgatggccgtctcgacgctgatgacgttgccgattatcgtgttattcttctttatgcaaaaaacgtttattcgcgggatcacgtttacaggcatcaaaggctaaaccacaatgagggaaaaacaaaacgccgttttacacaacaaagaacaagtgcgtgtggctagaatcgcctatagtagaagcatagggggcgatacgggtgaacgaaaaacttgcagtaacggtatttactgttcgtgaacagttaaaaacagtcggcattggcccagtttttaaagagcttgcacaaatgggctataaagggctgcaattgtcagggttgccagcaggctatgaccaagatgaagtcgcttaccatttaaaggctaacaatgtggttgctgccggaatgcatgtgccgtttgctcgcttgacgaatgagcttgaccttgtactgaaagaggcacagaaatacgggacaaacgctttgttctgcccatatttgcctgaagagctgcggacggaggaagggtaccgggccgttaaggaaggactaaataacgtggcgcaacaggcacctgattttcaaatcggtttccataaccatgctttcgagtttgagacaacgatcgatgggcaagatgcgcttagctatttgcttgaaccgagccaagataaccgcattctagctgaaattgacgtctactgggttaaaaaaggcggccgcgatccatatacatttattcagacgtacagcgggcgaatgccaatgatccacttgaaggatatgacgaaagatgaggaagagacatttgccgaagtcggagaagggtcgattccctttttgccgatcttgcaatggggcgaacaaaatggagtagagtggtatgttgtcgaacaagatgtatgcaaaagggacccgatggacagcttgcgcataagcctcgccaacttacagcaattggcggcacagctttaacgacgagtgtattctggctaagccaatgcttagccagacatgctttggcgcttgtattgagcaggcgtgatgcctgtgaattgtttaaacacttttgtaaaatgggatggataatgaaagccaacttggtagcaaatatcagtaatgctggcgtcgcttacgagaagttcaattttcgcttggttgactcgccgctgatacaaatatttaaaaatcgttacgcctgtcatttctttgaacactttcgacagatggtatttgctaacgtgaagtgcctcttctatcgtttcaaggccgagatgttcatgataatggctttcgataaaggagacgaccgcttggacggtcttttctttttggctcatttcccccttagggagctcgttctgtgacgtgccccaataggagcaaagataaagaagcagatccataaaagctaactggaagcggggcgcagccatagggccgccccgcttttggctatcatgtaactgggctagatgctgttccaattgctggcggctgcccccagtaaaagagaggcgcactggcttcacttgggcgaatggcaaaagggcgtggtcgtcacccaatgcttgaaacacctcctgaaaaaaacggtggtcaaagtgaatcgttgagcggacataaggatggccgtgatacagctttgggcaatgaagtgtcaagccattcattaaaatgatatcgccaggggcaagggaaaaaatttgatcgccaattaagtacgtgcatttgccttcatgaaaataaaagatttctgcttgttcgtgagagtgaaaggaaagcgtccgttcatttttatggtcttctttgtagttgaaattcaatgttggcgtttgcacaagtgcgccgctcatgttgtttgctccgatggcatcatacgctcagcttgtgcttgggcgcgtaagcacagctccgctgctttaaaagcatgggcttgcgtcatcgcgtgttccgtccggtttaggcaatccaaaatcaattcgccaaaaaacggaaacccgactttccccgataaagcaaaatgctgttcaccatctttgttaaccagatagagatggtcgccaccattgtcacgagcgacatcgacatacttgcgcagttcgattgtcccctctgtccctgtaataaacgtccgcccatctccccatgtgcttaacccgtctggcgtgtgccaatctactttaaaaaagtgcgtcgcgccattgtcaccgacgagcgtcgcatcgccgtaatcctcaagttcagggtaatcaggattggcataattggcgactttgctgtgaagcaccgtcgcgtcgcgggccccggaaaaatacaggaattgctcgatctgatggctgccgatgtcgcaaagaatgccgccatacttctctttttggaaaaaccattttggacggcttggggcgttaagccgatgcggtccaaacccggttacttgcaaaacgcggccaatcgctccttgctggattaaatcgcctgcaaatactgccgattcgacatgcaagcgctcgctgtaataaaccatgtatttttgtttagtccgctcaacggttgcttttgcctgttcaagctgctcaagcgatgtaaacggcgttttgtctgtaaaatagtctttaccgctttccattacttgaatgccaagggcggcccgctcagatgggatcgctgccgcggcaactaaagcgattgtttcatcgctaagaatatcggcaacgctaccagccacttgcacatttggataggtgtcaacaaaagcagcgacttttttaggatcagggtcgtacacagacacaagcgttgcccccgcctcaagcaagccattgcacataccgtatatatgtccatggtcaagcccgattgcagaaaagcgaaattcgtctttattgacgactttgtttggttttccttttggcgcataattcatcccattttgcttgttcatcgttttcctcctcagtagctttttcgtacatccaacgtttgattggttgtgaccgtttttcctggagagttgcggattcgttcgtttaagttttgctcataaagggcttcatttaatgggagttcgacccaattgtcgatccacgttgataaatgcatggcattggataacgtcaggccttgaatgccttcctcgcctggggcgattagtggaacgccatgtaaaatcgcatcgacaaaattttgggtaatgccttggtgccccgtttcggcgccagcgacagggatatcaattttccaatgttctggagcgccaaaaccacctttataggatgcattaaacacgggctctggcgtccgcaactgccaaaaagacagcgtttcgccttcaataaccgcttttccttttgtgccagtcacttcaaggcggttggtccctggagcttctgctgttgtcgtaataaacacaccggtcgcaccgctttcgtactccatataagcggtcacttcatcctccacttcaatatcgcggtattttccaaatgagcaaaaagcacggattcggttaggttccatgccaatcagccagccccataaatctaattggtgtgggcactggttgatgaggacgccgccgccctcgcctggccaggtggcgcgccaactgcttgagtcataatagctttgggagcggtaccaatcggtaatgatccagttcattcgccgaatcgtccctagttcgcccgattggatcaaatctttaagctttagataaatcggctttgtccgttgattgtacattaaagaatacacacgtccgcttttttgagccgcttcattcatttctcgtacttggcgcgtgtatacgccggcaggcttctcgcacaggacgtgcaggcctgcggcaaaggcttgctcagcaaggcgtgagtggctgtagtgtggcgtggcaatcaggacggcatcaacgacattggcgtgaaagaaatcgctttcatttgtaaatacaggcacgttgtcgccaaaatgttgttgcacggcactggctcgctctccatcttcttccaataatgcgccaagacatgcgccttttatgcttccctctactaagtaagcagcgtgggcgctacccatattgccaacgccaatcacaccgatccgcacttgatccattaaaccctctccttttgtttgcgcttacaaacagtgtagtcttcatgggtaggtttagctgatctattgttggggattttcgattcttacttatacgtggttgttgtctgtattcatagacaagcggtattggtgcggcgttgcattggttttgcgcttgaacatttggatgaaatacgagacattcgttaaaccgatacgctggctaatttcgtcgataggcaagctcgtcgtttgcaaaaggtggcacgcttctttcatgcgccgcgctgttaaatagtcggtaatgctacttcccgtctcacggcgaaacactttagaaacatacgacttggacaaatacaagtcctgtgccagtagcgacagattaaatggttccgttaaatggtcttcaatccagcccataatccgttcggcgtaatgaatgtggcggagcttctttgtaggaggccgtccctttagctgatgctgcatgtaactgagcagttgaatcaagagcaactcttcccgttcagcccgttcgttgatcgaagctgcttcagccattttgtcatgcatgtcgcataaagagcgaatgtaaaagtagtcttcagaaaaatcaataaacggatcttggttgtagccgtttttcaattgacggaaaaattgggccatcgccggataagctgttaggcgcttttcggcatgcaatggatcgaaatgtagcgttgcccgttcatatggagcagccgaagcaggcgcaacatggtgcaattgaaagggctggaagaaaaaaagcatgccttttttgattggcgacatttgctggttcacaacgacgctgccggctccgtcaaatacaatgagcaattcacaaccttggtgccaatggtaatagccattgtaatcagtcggataaaacagcttcttatgatgccaatcaagcgcttcggagctttggggacattgctggaacaacggcttttttgtcatcgctgccgcactccttttgtgcaacaaaacaatatttctttccattgtatcatgattttttcattggtggaagcgctatcatgtgtatcaaaaggagggagtcaaatggaaacagtacaacacatcatcgccatcgatgaattggaacaacgcatcacaaggatggccaagcaaatggagaatcgttcaccacatgcatcagatagcagcgggcggtacgacgatatgcctgttagctggtggacttctggcttttaccctggtttgctttggctgatgcatgatgtgacaggcaatgctttctttaaaaatcaagcagaaggttggtcacggaaaatcgaggaagcattccaagaacatccaatcatcttgcaccacgatgtgggctttcaatttttattgacggcggtgatggagtacgaacagacgggaagcgaagacgggctccgaatcggcttgaaggcagcaaattatttggcagggcggttcaatccaattggcggttttattaaagcgtggaatggtgacgacaaaaaaggctgggccattattgactgcatgatgaacatttctttgctttattgggccagccgcgtcaccaatgatccgagctacggacagatcgcctcagcacacgctaatacaacgttgcaatggggcgtccgcgacgatggcagcacaagccatatcctttcttttaactcccatacaggggaatttatcgagtccattggcggccaaggatacggacctgactcagcatggagccgggggaacgcctgggcgttgtatggctttgccaacgcctgtcgccacacagggaagcgcgcctatttgcatgcagctaaacgaattgcccacttttttcttgcagcactgccagaagacaatgtgccgtactgggattttcgctgtggcggggaagaagaggagccacgtgacagttccgccgcagccatcgccgcttctggcttacttgaaatcgaagcacaagtgccacagcgagaaaaacgaatgtaccggcgggcggcagaaaagatattgcaatcgctgagcacccactatttggcgagtgacgagagcgaggcgatcttgacgaaggcaacaggtaatgtcccacaaggccgcgacataaacgtctctctcatttatggtgattatttctttgctgaagcgattgcaaaacgaaacggttggcaacggcggattttctaattcaaagaaaagggggccagaaatggatgaaagcgaaaatgggggagagtgtccaactacagacacgccgaaataaagccgcaaaatcaacgctcacatggtatttgtttttgttgccaacgttattgggaattgcttgttttattctttatcccgtgtttgaatcgttccgtttgagtttttaccgctcaaacgggacgatcgagacatggatcggtttaggcaattatcaacgtgttttaagttcaagtgcattttggaatgcggtctacaatacgttttatattgctttttttcagctgctgctagcgattccagccgggtttgtcctcgcctgcatgatcaatcgcattaaacgatttcaaagcatgtttaaagtgttgtttttcttgcccaatgtcacgtcaatcgttgctgctgcgatgatttttatgtttgtgctccaaccggaagtcggcctcattaaccatttcttagacatgttcggcttgccaacttccccatggctatctgatccatcaacttcaaaagcaggcgtcattttgctggctgtttggcattggctcggctttgtcattattatttgtttggccaatttgcaggcgatttcaccggaattgtatgaagctgctgaaatcgacggcgcctccagtttgcaacaatggctgtttatcacgattccgaacatggcaggcacgttcgcttttctgtttattatgggctggatttctgggttacagcggttccaagaagtgtttgtccttggcggtccagggggcagccccagccgttccttgcagacaatggtcgccctcatttatgagcggggctttggcgggtttgaatttggcattgcctctgccatcacggtattgctgtttctcatcattcttgcatttacagtactgaacctcaagctgacgcgcttgaaactataggaggggatgaaattggcccaaagccaacaaacaaaccggcgtgttgctcaaatcgtgatctatgtctttctttttgtttgcgcgctgctcgtcatcgctccttttgtatggatggtgagcattagctttgaccgaatggccaatattcaagtcccgttcccgccaagcttcattcctgatttgttttcgatctttaactatgaattggtatttgaaaatggccgaattttccgtgcttatctcaattcaggattggtgacgtttggttctgtcgttttacaagtgtcagccgcgttattagggggctatgccttttcaaaagggcgctttaaagggaaaaagctgttgtttattgttgtgcttgcgacgatgatggtgcccattgaagcgcggcttatcccgctgtattcgatgtttaatcatgttggcttgctcgatacattttggccagtcattttgccttcaattttgtatggcctaggcgtgtttcttaccaaacaattttttgaccaaattcctgacagtttgcgggaagccgcgtcgattgacggcgctagcgaattcagaacattttttcaagtttacgcaccactggccggcccgattacagcgacactcctcatcttgtcgtttatgggcaactggaatgagtttgtatggccgctcgttgtcttaaactcagaacaactccagacgattccactttttcttgccagcttttcgttagaaaacggtacagcattagccggaatgacgatggcgctggcaacgatgagcgtcgtgcccattattatcgtatttatttgtttgcagcgctatattatccaaagcattgcccttagcggcttaaaagaatagggggactgcaaaaatgaagcgattgagtacacttgtggcagcctgttcgttggtgatgctcgccagttgtgcgccgcaaacggaaacagaaagtgccccgagtgaaaacgcagacttgaccgtcgcgatgattggcgattttaagatgcaagatacaacagacccgattacaggccaaaaagcgaccggtttccatgctgcaaaagcagaatttgaacggcttcatccaggcgttacgattgaattcatcatgatgccatggagcaactatgtcgccaatacacaagcaatgattgccgggagccaggccgacgtctaccaaatgccaggcgtcaacgactttgccgcccaaggtttggtagaaccactcgaaccattcattgaagaagacgacgattttgatttaggcgtctataacgacaacttggtcgaaggctggaaagtattcggtccagacgatgacacaccacaaatttactccctgccagtacttggggacggccgtttcatccaatacgacaagctattgtttgaacaatggggcgtcgagccactctccgattacccgacagtggaagaagtgatcgacaaagcgaagcaaatgacaggcgaaaatccagtcacaggtgaacaaaactacggcatttactttcccggcacaaacgacactgctttaacgctcgccaatcttatggaaggctttggcggcgaatggggcacaggccaacgctgggaagacattgagctgcacttcgactcgcttgaaatgaaacaggcgctcgaagcgatggttgagctcgccgactacatgccaaaaagctttattaacggccaaggcaatgaacgctggctgacgcctagcaacaatatcgccattggcatcaaccaaggaaacggcaacttaaaaaccatttacgctcaaagtttgcaagaccgcttcccgattgtgcaaaactttaaaaatgaaaacggcgtcggcggcatgttctccggcagcccgctcgcaatcggaaaaacgagcagaaacaaagacctggcctgggaatttattaagttcagcgcaagcgaatacttccagcgctttctatgggaagaatggggggctactcctgtcatcaaacaggcagccgaatgggaaagcatccaggagatggagctaatggaacccgtcctcgaagcgatgaccaacgccgtcacaccccgctatccatgggcctcctcccagccacgctacattttgcaagcaaaaaccgaaggcgccttaaccggcacgatgtcggtagaacaagccttggaggaagcgcaacaggaaagcatggagtggattgaagggcggtaggaagagtagggatgtaaggatactaagagcgtcggctggcgctcttttttggggggtgttgttgattcgttctagggtcttttcttcaaagtcttttaccatacgatggagaagtattatggtatcaacacagaattagacagtttcataagatgccaacccccggtgttaagtagttaagagaccagtaaattaacaaatgattaaaccaatacataaaatcaaataaagctaactttgtacccgtatgctgtattgctgacaaacttgaaagcatggctggactgcacaatcattccctgaggcagtagacattttttcatgatcgaaactgtgatatccatactgatccttccaattgttgtcgttcttcactattacctttgtttggcgaagacttgtttataagatatcaattacaagttcaacttggtttaaaatcaattctattataattgtctgttcttgggttatattaatttagctcttgtatctgtccttatggtgcacctatagcatcacttgattttcttgctgatggttggaacacgatggctaaatattttaattattggtatattattattgagtttataattttttagtaagagcaaacgtaatcataaagaggatgagtaaaataataagtctattaaaaaagaattttagtacttttgattctgcgatatagggagggtgatggtatgtataacaaggaagcaactatatcaaaacatgataatggtcccggtataactggatctcttccttttactgggaaatggatggtgggcaatactccggcacaacgaataccgagtcatggcacagatatgtttggggtaggttacgcaattgactttattgcagttgatgaccagaatcgaacaagttcatcaagaagttggaatacacttttgggatccgagtctcctgaaatcttctatgcatttggtaagccagttatctcacctgtttctggaaaagtagtaagcattcataatggcgaacctgatcatgaagcacggcgctcactacttacattgttaccatatatgttgactcaagccgatagaattcgtaaaggcccggaagcaatagctggaaattacgtaataattgctccagataattctgatttatatattgcaattgttcatctacagttagattcaattgtagtggaagaagggcagaatatttcagaaggggaatatctcgctaattgcgggaattctggaaattcaactcaacctcatatccatatacaagcaatggatagtttggacttttctaaaactcaaggtgtcccattatactttcgagaattttttcaatggaacaaaggagaaagtgagccaaaaactcgtgtgaaagcatttccggatgctaacactgttattagtcccaagtaatccatcagaataatgaaatttattatcagctattggagaaggagacatagttatgtcaaaacaatattgacttctgtttccgctaatcgagcatcagagatagtggagtgggcagctgcacagttggcatctggtcaaattgagcgatgaatagaagaccttgattgggtattttctcttggccttcgcccggttccgaatgcatgcctgtttgttttacgacgcctgcttaagaaccttgaatttctgagatgatggagctgagaaacttttgctgctcgacactagctttttcacatagcccccatagcaactgattctcatgctcagtcaaatcccgtttgagtgttgaactcattcgttgtttcaagtcgaaatagacgcccctttcttcaaccgcgcgaatatagtgcccgtccgggtcataaaaggtgaaataaccgaaatcattagtaaatataggttctttatcaataggggttccagcttgtttaatccgttcatgcaacgcaagcaagtcattcgttaatatctcaaccatcgtcacatgtccggtgctgcttgtgataaagaatgaatgaggaaagacaaacttcaattgtgtgacatcttcaggtttagtttccatcaaaaaaatacctggaccatttctgtttttcaatgcaatatgtgcttctccaaacgaataatctgttgaaaccaattcatagcccaagacagtacaataaaagtcgactgattttttcaaatttgtgactggaaatcgcatgctacagtacccaatcgcatccgcattattctgttctttgttcatatcctctactcctttctagttacttccaattctttgtcgctgatcgccattgccggttttaaaatcaaattggggtacttattcgttagaaaagtttataatcctgcttgtgactttaggcgaatattgaagacccccttagtaggatggaagttaaaggtgtatggctttgtaagcaacggatgaattttactagatgagttcggaagacttcttgcaaatcctcttgacgatttcctttaaatagcaaaggatgtaaaaaataaatatttactcaaatcttactgtttttcataaataatgttaggaggtttttatatatgggttcaagaatcatgcacttagctatttcttctataatatgtacaaaattaaagtttgaaaaagaatttcttttaggcgggttggctccagatgtacaacaacaaggagattcaacaagatttaattctcattttatgaaacaaaactgtgatggggagtacgtaatatacttcaaaagtaaaaggttattatagtcatcttattgcggataaatattggttagaaggcccttataaaaagtatgtaagacctaaatcgctaactaagagaaaatcagtgttaaaagatttctaccatgattatcagatattaaactcttttttgatagagaaatataatttggaggaattaacgttaaaaatgttaccagaaaacaaaataatagaagaaattgattactctaaattatctacactaattaatgaaacgaatattgattttaattattatgcagactcagacgaattgaaattactggcaaaagatgaaatgacaaactatatagatacaactgcagagttcctgatacagatgtttattaacaaatgaagctctggttgattgggtgctggcaaggctttttgttttaagcatttatgcacaaatctgttgcacaactatgtatttttatttttgaactaaacatataagaatcaccgttagaaatctacattagaaaatatatgaatgaaggagacaaaatgattatacaggaacaactaaacaataaaagtttaccttgtccaaatatcattcaaatggtgttatcaaatgttccaccagcaactcatttagtcaccgcagtccattgtctattattttttgaagaacggttagtactaacgaggttagagaatagaggctgggaaattccaggaggacatatggaagaaggtgaaacgatagtcgaagctttaagaagagaggtattagaagaggcgggagcttatataagttcggaaactttaatagggtatgaaaagattacgttattaggtagtagacaagatggttacccttatccttacccatcaagttatcagttatttttcgcagcaatagcggagcagtttgttaagataaatgacccaacaggacaagcgaaagaaagatacttcttagacttgaacaatgagtgtgataaaaagagtcaatgggtagttgaccattataaactttgtctagcagcttataatgctttatttcacacaaataaggatgattaaaaggccagcgccaacgcctgattgctccgttggtgctagccattacgaattcatagcatacgaaaagtggttgtgatgtcagttggtgtgttagtagagccaattgcaggatttttggcgcccatcggtcgttttataacgatccgcatattttctaaatgattcttctcagttcaaatcagaatgcaaatcattcccggtctctgtttgataggctgcgaaatcatcaaactcttcattcttccatatccaatacgcttgatttttgctgctatagtgattatagtcgacactatttccttcattttcggtgaactcgtttgtgatcattcgtccgtcttcattcgctatgatgtagttgttatgcaattcattgtttctagtgtcgaaggctagattgatttcaccataatcaaggtgcttcccgttattttctgttaactcgttttctttaatgatgcaattttccgtccttccacggtcttcgtcatagccgccaagggtaatgcctgctccataattgttataaatgcggttcgttgatacttccacatttgaagtggcaccgccggcatgctcacttgccagttcaattccaaaatcattgtggtgaacgtcattgtcgataatttttacagctttgcctccatccacgtatatgccggcggctgagtaatcttccccataggcgggattgccaaaagaggaactattgtatacatgattttcttcaattacaccatttctagcctgatcttgcggaggattcggcgcggtcccttcaaagccgatgatgtcgattccgatattgttgttatcgtgcacaatattccgcgcaattcgaaagccgtctacatttccattcaccgccatcgcttcgctcgcccctagtttcaggttatataactcattttcgataatagcaagctgttccaatgaagttgccgagttaccataaacggcaatgccatgtgcattaccgcctcctattcgctgatctgcgttcgttcccatatcgtggatgcgattccctatcatttcaatatttctgccgctaccgctcacatgaatgccaacgggcgtgacatcgggtgatgctgtataaaaatggcgtatttcaatgcctttgacacgtacataactggcattgtcaatatggatgacgccatcttcaacttgctttacgcccttgccgtccattattgccgtttgtccctccacattgcgcaaagttatgtaaccttggtcaagcgatccagatttattgatgctcaccgtttggtgatagactccttccaaaaggaatacagtgccgcctggtttgactaattcgattgctttctggatactggcaaacggtgcattcattgttccaggattcgtatctttgccttgtggtgagacgtagtaatctcttgtttccgtttcggctgttgctggctgcctctcctccgaagttattgtgtcattaggatatagtttggtgctgaagtaagcggcactggctaataacaatacgagggagcaagtccaaagaatcttttttttggtcatgataacacatccggatttatgatttttcttttgtattagaatagcctagttcttggtcattgtatagaaagcagctttaagctattgaaggtgattgcctttgctactcaaagggtgctgattcgtctaccatcttaaatacataaccattgacaatgttcaaaggatgctcctatactatgaacggaatagaataacttacctaaaacctatttgggaagttgtggacttttctagagagcaatttctattttcgccacacaaaggccgtacggtcattgtgtggttttttgcgttcaataaaggaggaaactggcgcgatgaaattatggcactatgcattgattgtttttttaggaggctgcagttacggggtgttgtctacttttgttaaattggcgtatgcagcaggttttaccgtgtcaacagtaaccggagggcaatatctctccggggttgtgcttatttggcttgcagtgttctttacgaaaaagaaaaaaccgacacgtctacaatttttaaagcttatcgtatctggtattccattcgggttaacaggaatattttattaccaagccttgcaaactttaaacgcctctctagcgatcgtgtttttgttccaatttgtttggatcggagctttgttagagtggggattccataagaaaaagccgaccaaaaggaaactaatttccatcgcgttgcttctggttggctccatgttggcagccaatattctatttcaggagcacttggcgttatcatggcaaggaagcctttggggaatgcttgcagcatcatccttttccacattcatttttttgagtggttcggttgaaaaggacacgcctcccgttttaaaaagcgctcttctttgcacaggaggcgtattgaccgtatttattgtatttccaccaacgtttttatttgacttagatgtattaatggggatttttccttatggattcgcactgggcatattcggcgtcgtccttccgccgcttctcttttcgattggaatgccgcatgtcggtccgggattaggaaccattctaacgtcatctgaattgccggttgtgattatcatgtcttctttagtgctaggagaagcgataagctgggctcagtgggttggagtgctcattattctcggtgggatcgtttacagcaacgctcgatttgatagtcggaaaaaattgtctttaaataaggctgacagccataacgtgagctaaaagtgtgtgataaaagagcctgctaaacccgaaggttagtaggcttttctatggctttccggttgttgtgtttaatcctatcgaatcaatgtcagtcaaggcatcaaccgattcattttttaattgtagctatcgttgacacggtagctgcctacatatatcatttagttagtcatataactaactaaatagtggtggtgaacgaaaatggctgaacctaatgtaattacaaagcaagatttaattgaatcggctaaaacgtgcattgtcgagaatggggtcaatcagttaacgcttaaggctgttgcagagggagcgggagtgacgcaaggaacggtttactaccattttaaaacgaaagagcagcttatgattgaagtggtagaggatatgtgcaaaacctcttgggagaggttagaacagatgaaagaggatacgggccaacaagggattgagtggatgaaagcaggtcttgaagctgcttatgaaagaaattcaagcgactcttcttatcactcattatttttctcattggttgcggcaggattgcacaatcataacattcgtgagcgaattggcggattactgtcctatgagaatgacgttctccaaaaacaaattcaagcattagcaggagacgaatgttccggcatgccgccagacgtctgcagtgtgttcgtgaatgcgctcatagatggtttggcggttcagtctttaatgagatcagatttcgatagcaaaaaagtgttcgactatctggaaaggttgctggctaaacaattgggaagccgttagtcttttcacattcattcgctgccaaaggatgtgatatagtttgttttttcttgtatggggttttttagtatggttaggagcgacagcggtttttcgctttttcgggcagtttttcttctcactggaacagccgctgttgttggttgctgcgtatgtaggcgtaattccgttgattttgagtctgacccttccggtttaccgctataaaaagttggagcggagggaacgccaaaaatccgctgttttgattgctttgccggggatgttgttcgatgtcgttgtgttgttgttttttgctaatatcttcgtaaacttagatccggaaatggatcgcatgtttgcctcatggctgttatgggcctactcagcgatactccttacagggttagtgccaaggaaaaggaatgttactaaaggttattaaagggacgagacggggaagcgtcttgtccaatcggactaattttataaaaaccgatttgacttataaaaaagtgcttccgaacgatgcgataaaccgagcaacgttttgggatgacacgagttagtatgacgctgcattaagcagttctgtttcatacgcccctgcttggcgaagacctatgaaggcgactatctggaatcgatgtcgatctggaaatctggtcgtatcaagggggagttgctggcagaactatcaaccaagacacccgatcaagcagaagcagatgcgattgaagctgtatggctccatggtttaacagaatacggctggttaagcgctgagcaaacctcaaaaacgagttttgtgatggatcggtaaaagggatcagggtgaataagagaagtactttaaacaggctcttcctatctaacaatggataagaagagcctgtttaaatcgaaatgctcagttatatgagggttcaaaatagagctcgataattgataaagaactgatataatgacatcgatgagcttgatggtggcgattcacaatcggttcacttagtggagaaaggtaatatggtttctcgagaagaatatcctaaaatgtaaataataacgaaagtgtgttgacattgaaaaaagcaattatcattggagctagttctggcatcgggaaagagttagccaagatcctttcatttgaagggtatattgttggtctagtcgctagaagaacagcgaatttaattgaacttcaaaaacaacttcccaataaagcatttattaaaacggtcgatatttcttgtccaaataaagcaaagaatcttatagaggaattaataagagagatgggcggcatagatttatttgttatcagttctggagtggggcatctaaatcccgatttaaatttaagttatgaacaagaagttatagacgtgaatgtttcaggatttgtagctatgtcaaatgttgcttacaaacattttttatcaaaaggttccggacatttattgggtatttcctccattggtgcattaatgccaaatccaagtgctccagcttataatgcttcgaaagttttcgtatccaattacttggtgagtatccgtcataaactggagtcgcaaacaaaaaacgtagtagtaactgacgttaaatgtgggtttgtcgatacaaatatggctaaaggtgacaaaaataaaatgttttgggtggcgtctccggaaaaggctgcacttcaaatatatgatggtttaaaaaagaagaaaaagttaatatatgtgtctaaacgttggcgtactattgcgtgggtattaaaagtcatttcattaatgaggtaattgcggttcattgtccagtcgtatcaagtcgaattgttgacagaactatcaactaagatgcctgatcaagcagaagcgaacgcgatagaacctgcctggctccatggtttaacagaatccggctggttaagcgctgagcaaacctcagaaacgagttttgtgatggagcgctaaataagacccatacatgccaatatctacacaaattcctttaaataaaaacagctacatgagagagtagctgtttttttatgcttccattttttcgtgctgcctcgtttgatcaactcagtcccttcggcgatcgtgccttttttgtgatgtccatcaataagggagactagctgtttaactgcggttcctcccatctcgtaaagagggtagttttacagtcgttagatgtcatcatcgttgcaatttcggcatcttgcaaagtgacaatggacaagtcatttggaactcgaatgttgtgttcgttgcaagcttttaatgtcccaattgcgacaaggaggcttgaaacaaataaagctgttggctgaaccggagctttgaaaagttcgttcatggcgttatagccgccaaccaggctgtacggagcctccaccattaatgcaggatgaaatggaatatcttttaaacgtgttgatcattacgatcgtgccgttattggtttattttgttttgccgattttatggggattgaatgttcattcctttcctttctaattgctgaaagaaagggtgggcggtatggaataagtggaaaaggaaagcagtgcactacgaatgaactgctttctttacactaccgctaaaatccgttgcttcatttctgtcagcttttttcagcccgtgtaaataagtgatgatttcggaggcgaagataaagaagagcctaatctttgatcagttgctatccccgctgttccaatcgaatactactgcgggaatatgctttatgaatttatccagtttgataggaaaatacgcttcaatatctcgctttaagtctttctctaatgttaaaaacgctcgaatcaagtagtctaggtcaaatacatgataaagctcttgttctgcccaaatcgatttcagtctagcgctatcgccaaaaggaatgatagagagaatcgccccgtcttcgtattcatcaaactccaacgtatagtaatgaaactcctgcgctcttttagactgatcgattgccttcttccaattatacaagtatgtataaaactcgagaatcgggaactctgcttgatcaaagtaaaggtcgtcattgataaaaattttaaatcgggcactgacatctaaaatcgcagaaacgtcttttctctgtttatcagtaatcccgtttctgtcactagtgaactgatattccatgtttatttgagtggattggctgtccatagcattcataaatttccaccactcctttaatagataaaatgatgcgaaaaggaagacgacgaatcagaaccattataattgaatagtgcgtgactttacatccctttttcatgtagggcaccgctcttgcagaaactactagaggaatctcaacaaccaaaggcaagattcctatgtgtagcaggtcaaatgaatcttccttttttagaaaatttaacggttttatttacagtgtgcatgaaaaacagcattcgtaggtgtacatgtttcgttggatgaaaattgagcaacaaggcctgatctttcctgtttaactacccaaaataagaaatattctgtatgatatagctaaatgaaagggggagttcatacagatggaacaggtgttgcaagcaccgcaaagctataatgtagcggctacaattgaacgggaagcgatcagaacacaaaaagcgattatttggcaaaacgagtccggtgacaaactagaatggacgtacgacgagttaatccaaaagatgaaccagctcgcaaatgccttaagccgaagcggcctgaaaaaaggcgacccagtgttgttgcttttcccacgcgtgccggaggcgtatgcggcttaccttgcttgtttgaaaggcggctttgtcatcattccgtgttcagggatgttgcgagcgaaggatctggcttaccggcttagccattcgcaggcgaaaggcgtccttgcgtacaaaggatttacagctgaaatcgacaaaatttctgatggcagcaccgacggcctaattgcaaaatgggtgtttggcgaagcgccgagcggctgggaaaatgcgaatgatcgaacgaaaaatgaaagcgcttcctttgagcgagaaatggataaagaggaaatcgcgtttttgccctatacgtctggcacgactggaaatccaaaagccgttgtccatacccaagcttgggcctttgcccatttgcaaaccgctgcaaccgaatggctcggtgtggaaacaggagaccttgtttgggcgactgcggccccaggctggcaaaagtgggtatggagtccctttttatctgtagttggcaagcaggcgactgcctttgtttacgatggcccttttcaggcaaaaacgtatttacaattaatcgatgaatatggcattggtgtgttttgcgcgacgccgactgaataccgaatgttggcgaaagaagaggcgctttcctcttttaaacttagcagcatcaaacatgctgtttcagcaggagaaccccttaatcgagcagtgattgccacatttcaagaacaatttgatattacggtgcgcgatggatacgggcaaacggagaacacgttgttaattggcacgatgattggcatggaagcgcgacctggttcaatgggcaaaccaacgtctggaaacggtgttgttatattgaatgaagctggagaggaggcaggcattggcgaggttggcgatattgctgtccataaagatgcgcctgcattgttccgtgagtattacagagatcccgaaaggacaaaagcagcttatcgcggttcgtattatttaacaggcgaccgtgcttatcgggacgaagaaggctatttttggtttgaaggacgaagtgacgatattattatttcatcagggtacacgattgggccattcgaagtcgaggatgcattaacgaaacatccagctgtcaaagaatgtgccgttgtcgctagcccagatgaaattcgcggccatattgtcaaagcgtttgtcgtgctcaatcggccaacggacgatcaaaacaagctaacaaaagaactgcaagaatttgtcaaacgtgaaacggccccatacaaatacccacgggcaattgaatatgtagccggactaccaaaaacgatttctggaaagataagaaggatcgagctccggcagttaagcgaatcttgaatggtttaggtgtgttgattaatgggaacaggcttccggctaacattgttggctggaagtttgttcgttgtaagctaaatgaaaaacatttatacaaatccaaaggagtactaaagcaaggagtgggaacggtgaaaccaataacaatcgctgtgtttgcttttttactgcttgctggctgtgagcagagatttgatagctttgccgaaacaagagcgtatctcaacgagttagatgagtttcaagaagcgcaactgcttaaaagtgaacaaatatcagataagcaggagatgagcgcttatcgaagaggttcagggattttgtttgtttcaattaaaaaagaagaggatgagtatgtttgggagagcagtgacagcgattgggattttgctggtgatggcgacttctcttatgagctgcttgctatcgatggcgttcatgtgctgtttggaaaagtgctaagcgaacacgagattaagtcaatttcgttagatgggcagccgcttcaatatgatccagattccaatttcttttttgcctttcgtgaagaaccgtttgtgattgaagaagaaaatgtggacataaccgttgcaatggaataaatctcttccaccgttcaaagccaacaaccatttcttcatgggtgctggctttttgtgtggctatcgtttcaattaaaaatagcgctaatcgacaaggacttatcttcgctacaaagatgttttatactagaggggcgatacataacatcaaggcggaaaaggggaaaatgtatggaacatgccaaaacggaaccgatttttttagagcctgttttgcaagaacggatttggggcggacagaagctagcggcgtacggctatcatctgccctatgagcggactggggaatgttggggaatttccgcccaccctcatggacaaagcaaagtggcaagagggctgctaaaaggcaagacgttggcagagctatgggatcagcaaggcgacttgtttggcggcaaaacgagcgaaacgtttccgttgctcgtgaaactattagatgcaagagaagatttatctgtacaagtccatccaaatgacgaacaagcgaagcgattggaggatcatgaagcatacggaaagactgagtgctggtatgtagtcgaagcggaacaaggggcggaattgattttaggccatacggcaaaatcaaaagcggagtttgcagaaatggttgaagcgggaagatgggacgagctccttcgccgcattcctattcaaacaggcgactttttccacgtgccgagtggaacgatccatgcccttggcgctggaagtgtgattttggaaacgcagcaaagttcagatacgacttaccgcgtttatgactttgaccggaaaggggcagatgggaaacagcgggagctgcatttagacaaggcacaggaagtcgcgatgattccacacgcgccataccaagcaaacactgaaacggttgaaaaaagcaatagccacacactcactcgtctcgtcgcaacggaattttttacagtgtataaagcagttgtgcaggaaaaatgggaggcggcgtttcaagccccttatgtactcgtaagcgtcatcagtggcgagggagagctagtcgttaacggaaaaaactacacgcttggcaaaggcgaccatttcattttgcctgtacaagcgacatcatttgaaatcaacggtcacattgaggcgattttaagccacacgtaaaaaaacgaggacttttcatgagtttgttaacagtgtataaagcccgctagatctcgactggccattgcttggccggtttttttgttgggaaaatcgcagaaaaggtttcttttattttccttttttgtaacaatggataataatgtctttggaaggatgatgcccctatgtcaactgacattgctcctgaaatgcttggtgcaaaaattgttgaatggtatcgctgtattgttgctcgtgatatggaacaagtcattaccctcaaaaacgaagtggaacgctttgtcgaaacaactgaaatacatgatgaaaaagtgttatcattttactctttggtcatgttccgataccagcttctaatggaagattttcaaaaaagaaaggtagcatttcctgacttggaaattatccgcgataaagacttttataatgataaactgttaaaattcctctactattttgtccatggacaagcagagttttaccaaggccgttacaaatcagccattcgtctctatcatattgccgaaggtcttgttaatcacatacaagataaagccgaaaaagccgagtttttctatcgtttaggagaaagttactatcgtattgatcaatatacttttgcggtcgcctatattgagcaagcgattgatttgtttgaacagcaacagtttaataaggaaaaatttttaaactgcaaattgttgttagccgcaatcaataccgagctttctttatttgacaaggctgaatttgtttaccaatcagtgctttctgaagcaaaagcttttcctactacacatgctcttgttctccgtagcttagggatgaatcgtacacgccaacacaagcttgaagaagcgaggcagtactttattcaagcacttaatacgggcgatcatcgggaaagcgttgccggaatgaagtcaagctgggatctagcaaatatcctttttagattacaacgagattataaatatgctctatctttattacaagaagcaaaagcgaaagcagagtccttaaataatgaagagtatatagtacggtgttcaattaccgaaaccttatttgtaaagggtggcgtagatgagacactacttcaactaatgaaaacattggaggaacatgaactttattttgagtatgatgagatgatagaagaaattatattatactatcaggaaagagatgatctgcataaagccatctcttttactatacttaaaaagttacaaacactaaaacgatcctatcttcaaaccttttcagatgaactgtaaaaccgccttttaaccagacaagcgtcggaaaggtcgttatctcgtatagtgaatcgattttcggcaaagcaaagcaagcgaatgcctaaacgcattcgcttgcttacgacttctaccaaaataaaaacaacagcagcaatccaagggcaatccggtacagcgcgaacgggacaagcttgattttgttaattagctttaaaaagaaccggactaccacaagggaaacgagaaaggcactaataaagccggtggcgtaaaagggcagcaagcttatctcaagggcgtcccaattcttgatcagtgacagcgcactagcgccaaccataattgggatcgccataataaaggtgaagtttgctgctgctcggtgcgttaagccaagcatgacaccgcctgatatcgttgagccagaacgggaaaagcctggccaaagggcaaggcattggaatagcccaattgccagtgcttgtttgtaagaaatgtcgtctacttgctgtttcttcttattgttccgtttgtttataaaatcggcggcaatcatgagaaaagcaccagcaattaaagcaaatgcgaccgtgcgaacatggaaaatcgactccattttatcctcaaataataaaccgagcactgcagctggcaacaagccgacggcaacttttcctaacgtcaaaccccgtccttcgctctgtgttgctgcttgttttttaaagcctgctaattgcaagaggcggtccttgaacaaaagcgccactgctaagatcgatcctagctggatcacaattttaaacacgtaggcattttgtgacccgaccaactcgcttgatttgagccataaatcatccactatgatcatatgccctgttgatgacactggcgcatattccgtcaatccttcgactaggccaaggatagcggcaacaacccattcccaaacatccatcgcaagtctccattctatcgattctgttcaagctaaatcatacacgttttataagaagaaggcgtgtttattcttgtcgatttctgatgggagattgtcaaattgcttcatctttttaaacgtagttaactagcgtatgaatggcgctgttcgtctttcgtttcaggcacttttgctagcaaagcaaagccgattaaaaacaatgcgatcaggctaaagacacctgcattggtattgcctgtcaattgcgtcgtgagtccgagcaagagggggcccatcacggcggcgaatttgccgaacacgttataaaagccaaaaaactcatttgctttctgtttaggaacgagcttcgcaaaatacgatcggcttaatgcttggatgcccccttgtgaagtggcaactaacatcgccaaaatccaaaaatcaagtgtggtccgtaagaaaaacgcatacacgcaaacaacaatatagacgcaaatgccggcataaagcatttttttgcctgtaaagcgctgtgacagcctgccgtaaagaattgaacaaggggcagcgacgatttgcgtgacaaataagacaattaacaaatcggttgcgctaattccaagatcactgccataagcagtagacatgcgaataatcgtgcctaccccgtcaatgtaaaagaaataggccaacaaaaataaaaacaacggtttgtattggcgcacttctttaaatgtttgcccaagctgtttaaaactattggcaatcggtctcgcttcccgttttttgtagtaacgttgcgtcacatgcttaagcatcggaatcgtgaaagcagcccaccacaaggccgtaatcaaaaatgcaattttgcttgcggcataaaaagagagtgggatgatttccaactgtgccaatacaatcaaagcaatgctaatgagaaaggggatgcagctgccgatatagccgagcccgtagccccgtgcagaaatatcatgcattcgattttcttcggttacatcgactaaaaaagcatcgtaaaatacattggcgccagcaaagccaactgccgtcactgtatagaggatcaggagaatgagccaatgatcgccaggcacaaacgcgagcaaagcggtagaaccagcgccgagtgaaaaaaagaaaacaaaaaagcgttttttcaagccttcgtagtcagcaatcgtccctaaaatcggacttagcatcgccaaaatgaatgtggcaatcgcaatcgtgtagccgagatacgccgttgacgtagcgtcactcaagcctgagtctgttgcaaccgctttaaaaaagagtggaaacactgctgtcgtaacaataatcgaataggccgagttcgcccagtcgtaaagcatccagcttttttcttgtttactaaaccgtcttgttttcattggttatcctcctggcatagtcgtttatcgtttagctgtggctgcaaagaaaaatatgtttttgtgtacatgctataagtatatacagtgattgtaaagacatgttggcttctatttaaaaagtttgaccaagcagacgagctgtagggtttgcaaaataggccaaacatcgttgggcatgataaactgtaaggataactatgacaaaagggggcggcgatttttgctgactgatgtgcttgcacaaaaaattatagctgaagcgtcgcaattgataaaagaagatctcatcattgtcaatagagacggctacattattgccagcaccgacccgaaccgagtcggcacttttcatgaaggcgccagcctatgcatggccgaacggcgtaaacgtcttattacagccaaagacgcaacccatttaaaaggagtcaaaccagggcttaatttgccgattgtcgtgtttcagcaagtagcaggggtgattggcataacgggagaacctgagcaaatggagccgtacggcgaattgttaaggcggatgacagaattgctcattcaggaagcccatatgatggaacaaatgcaatggcaaactcgtgctctgcaagggtttgtgcaagagtggcttgaagcaggggcgctgaccgaacctttaaaacggcaagcggcggcccattcccttgatgtgcaaaccgaaaaacaaattgtcctgattgagacaggattggaggaatcgatccactggcgcggtttggcgcagtggcgtgaacagagaaaagggatggttgccatcccgtgggaaagaaagaaggttctgcttgtatgctcgccgcagacagaaactgcgcttaaagcgactgtccatacattggcggaaacgctggccattggcgggagctggtggggaggagccggaagggcgttgccgcctgatgagattaagaagagttacgcggaagcgcaagcggccttagtggcagcaagaaaaacaaaccgtttcgtgtttgaacatgagttgaagttggaactttgtgtagaagcaattcctgctgacacaaaagcacgctttgttgaacgggttttaaaaaaagtcagcgatgaacaagagcttttagggacattggctgcttttttagagaacgaccaatcgttgaaacggacagcagaagcccttcatgttcatatcaacacactccattaccgttttcaaaagcttaaacagcatacaggtttagatgtacgaaagagtgaggattttgttcttttttatttggcccatttgtttttggaggattctacaaagaaagcggattcgaacggcgataattttgcatgagctcctatagaaaagcgatttccgattttgtaagcttaagagattaagaacaaaagaggaagagggatgagagcatgctgtctcaagcaataacagaagaattggagaacattgtcggcaatggcaatgtgcaaacgtctcaggcgagtcgccttgtctattcctatgatgccaccccaaattttcaagcccttcctgacgccgtggtcgcgccgcgctcgaccgaggaagttgctgaggtggtcaaagtgtgcaaccgggaaaagatcccgattgtgccaagagggtcaggtacaaatttatgcgcagggacagtgccgacagaaggcggcattgttctgctgttcaaacatatgaacaaaatccttgaagttgatgaggacaatttgacagtaaccgtacaaccaggtgttatcacattggatatgattgaggctgttgaaaaaaagcagcttttctacccgcctgacccaagttcgatgaaaatttctacaattggcggcaacattaatgaaaactccggtggtttgcgtgggttaaaatacggcgtgacccgcgattatgtgttggcgcttgaagcggtgttgcctaatggtgatattatccggaccggcgggaaattggcgaaggacgttgctggctacgacttaacgcgcttgcttgttggagcggaaggaacgcttggcgttattacggaagcgacattaaaacttgtgccgatgccggagacgaaacagacgatgcttgctttgttttctgatatggaagcagcagcacggtccgtttcttccattattgccaaccgcattattcccgttacgcttgagtttctggaccagccgacattaaaagcggtggaagattttgcgaaaatcgggctcccgactgatgctgaggccgtattgctcattgagcaagatggagcaaaagaagtggtggaacgggacattcagcgtatagctgagatttgtttgaatgagggagcgctttcggctgaagtcgcatcgtcaaaagaagaagcgctcgaactgacggcagcccgccgtgcagcattgtctgcgttggcaaggctccggccgacaacaattttagaggacgcaacagtgccacgctcagaagtagcgaatatggtccgggcaattaacgagattgcgaaagaatacaacgtaacaatttgtacgtttgggcatgctggagatggcaacttgcacccgacgtgcttaacggatgtccgtgatgaagaggagatgcaccgagtcgaggaagcatttgctgctatttttgcaaaggcgctcgaacttggcggcacgattacgggcgagcatggcgtcggcatgatgaaagccccttatttggaatggaagctaggagaggaagggattgcgttaatgcgcgcgatcaaacaagcgattgatccaaaccatattatgaacccggcaaaactgtttgcgaaagaaacaagaaaacgggtggtggtgagccaatgagccaagtggaaatgacggcacgggagcaggcgattcaagctgattttgcaaaacggatggatgaaaccgaactccttaactgcatgcaatgtgggttttgtttgccacactgccccacgtatttggagactggttatcaagaagcacactcccctcggggccgcattgccctgatgaaagcggtccatgacggtttgatcgccccagatgaggaagtcaaacgttccttagacttatgcttgggctgtcgcgcgtgcgaacctgtttgtcctgcaggcgtgaactatggccatatgcttgaagaagcccgtgacatttttgaagaccattccacccattctgctggtgtcaaaacggtgcgcaaaaccgtgtttgaagggttgtttccccaccaaaaccgaatggaaaaagcgatgagccttgttggcttttaccagcgtagcggactgcagcacattacccggaaaatagggtttatgaagttgtttccagagagcatgcaggcaatggaaagggcgatgccaaacgtccttcctcaaaaagagcggaaggcacacaaacgtgtatatgaagcagagcaagcgcctgttgctacagttgcttttttcaaaggctgtttaatggatacgatgttttatgaaaccaacaaaaacacgattatgctattgcaaaaggctggttgccgtattgtcgtcccagatagccaaggatgctgcggcgccctccatggccatagcggcgagaaggcaaaggcgcaagaaatggcgcgcaaaaacattgatgcctttgaggatagcggcgccgattttattatttcaaatgccggcggttgtggcgcttttctccaagactatagtcatttgcttagcaaagaccgtgattacgctgagcgtgccgctgattttacagccaagatgaaagacatctcgcaaattttagtagaagtcggctttcatgagcgcgtgccgctgaaattggcttccaagcggatcacataccaagactcgtgccatttacgcaatgtcatgaaaacagcctctgctccccggcagttgctccaggcaattgaaggggtcgaagtgatcgaaatggaaaaagccgatagttgttgcgggtcagcaggtatttacaacatcattgagtcagaaatgtcgatgcaaattcttgaccggaaaatggaacatacaaaagcgacggacgcaacgacagttgtcacagcgaaccctggctgccttttgcaaatgaagcttggcattgaacgcgaaggcttacaacaaaaaatggaggctgtccatatcgtcgacttacttgcagaagcggttcaataaaaaagccttgctaggttgtcctagcaaggcttttttgcgtttacggcgataatgaggggaatgaaaccgttgacggtgaaagcgcgctccattaaaatgaataaatgttactatccttattaataatgttggttttataggttaaaggggggatcgcgatgcaagtgaaaattagccatgtggaaaagacatttgccaaaggcaaaaacgatacgctccacgttttaaacgatattgacatgacgattaacgaaggcgactttgtttcgcttctcggcccttcaggctgcggaaaatcgacgattctcaacttaattgctgggcttgactcgccgacaagcggtggcgtgttcgttaatgggaagcaagtaaacaaacctggcaacgatcgtgtagttgttttccaagaagcaggtttgtttccatggatgaatgtgctcgaaaatgtcgcgtatggactaaaattaaaaggtttttccaatcaagaaagtgcggaaaaggcacgtgaaggtttgaaaatggtgcatcttggcaacttttccactgcttatccccatgagctatctgggggaatgaagcaacgtgtcgcgattgcacgggcacttgtgatggatcctgatattttgctcatggatgaaccttttgccgctcttgatgagcaaacgagaatggtcctccataaagaactgttggaaatatgggcagagacaggcaaaacgattttattcattactcataatatccgcgaagcggtcatgctttccaatcgaattgtgttaatggggacaagacctgggcgtataaaaaaagagtttatcgttcaagcggcgctgcctcgtgatccagcagatagttacctagttgatttggaaagaaggatcatgaaagaacttgaagacgagatggaaaaagtgttaaaggaggagtttggagatggttacagctataagacggaccgtattcgtcgcggcgatcatagctatatgggagatcatatctaaaagcggcttctttccaaccttcctttttcctccgttgattttgccgaatgatccaggcggcgttaccgtagttggaacgcttatcaatggcattgcggacggacgcatgttaacagcaacgggcctcacgctcggacggttgttgatcggttttgccattgcgatttctcttggccttttgttcggttatttgattgcccgctacaaatgggtagacgacacactcggctttttggtgacggcgttgcagtcgattccaagcattgtttggttcccgctagcgattgtttggtttggcttaggcaatgcatcaattttgtttattgttacaatcggagctacttggacaatgacagttagcgccagcaccggctttaaaaacgtgcccagcttgtatttgaatgtagcacggacgcttggctcatcaggcactcatctcgtgcggactgttgtgttgcccgcttctgtcccacacttgatttccggtttgcggatggcctgggctttcgcttggcgggccattatggctggtgagctgctaggtggttcaggcgggttagggtatttgcttaatatggggcgttcgctccagcaaatggatcttgtcttgtctgtcatgatcatcatcgccattattggcacgttaatggataatctcgtgttcttgcgtgctgaacgatctgtccagaaaaagtggggcttaaagccaagcctataaataaagtacatacgataaagaaggggagagtggaatgaaaggaatcataaaagcaggcgcgtttgcctgtgtggcaacgcttgccttagcaggatgcggccaaggcgcaacagaaggggaagttcggattggttactttccgaatctcacccatattgccaccattattgcgttggagaatggctattttgatgaagaatttggcgaagagacgacgattgaaacgatgactgttccagacggcagcgcttttatggaggcgatgtcaacaaatgagattgacatcggcacagtcgggccaggtccagcaatgaatacgtatacgtccaatccggcccattcgattattgctggtgcagtcaatggcggtgctgtattaatggttcgtgaggatgctgaagtcgagacagttgctgatttagctggggaacgggtagcagtgccgacactaggttcgacgcaggatgtcatgctccgtaaagccttagcgaatgcaggcgttgatgccgaggaggtagagctcattcctcaagcgccagcggatacgtcgacgttgtttaaccaaggggacgtagcagcggcagcgacccaggaaccgtggggcagctatttggaggaacaaacaggggctcgttttttgttggacgctgatgcgtttgcttggggagaggagtctaccaacacggttgttgtagcgacgcatgattttcttgatgtcaatgaggagttagcacgggcctatttgcgcgcacataaaaaagcggttgagtttgtccaagagcaacctgacgaagcagccagcatttttgtcagccatatcaaggaagaaacagggaacgagctgaacatagcagaaatagagcaatcaatggagcggttgttcccaaccgttgacgttaatgaacaagtattgcaagagatggccgaaattgcccatgaggcaggcaatatgagctcaacggatattgacggcttggttgatttaagcttcctagaaaaataaaaacaattgctggaaaggaaagttttcttatttgaggcagccaagcgaaacggactgaatcgtgaaatctatttttttaggattcagtccgttttgaaacagcggccatattagagcgacagaacccttggtacctgggcttagctccgctatttcctatagatggtttgtccttccatcgttgattcaaacgtgtacatgaccatattcagtgacgtactgtcctcattaagaaagcgatcgtcttatgtttaacggggatcgatcacagggccagtgtcttgctcatgatgaaatcgatttgttcgtcatctcccatataaaatgagtgtgctcctgtttgcacaaaccccattttcttataaaaagaaagggcattgtcattcttttcccatacgccgagccagatgttcttcttcttccgttcgattgccatttcgatcgcttgatttaacaaatatttaccaagcccaagcttttggtagttggtctttatatagatcctttggatttcaagtgattcagcccccatatcttcagactgggcatcattcatattaacttttaaatatccagcaacgtcattgttaaagtaaacaaaaaagaaatgcgaggaacggttggctaactctttttctaactgtttttcgttaaatgcttttttcaaataggcattcatattttcaggtgtattatgatccttaaatgtctcattgtatgtttcataactaatgtcttgaagtaatcgcaagtcagctaatgtgcactttttaatcgtgatagtcaattatttgtccaccctttacgaatcaataatgtcttttgttgccctttttgacaaattcccaatccttctctacattctttctgactctttgtagcagatgaaaaagggtatctgcttcattttcagaaaatcctgttaaggcaacggtattggaatagtcattttctttcctgataaaaggatacacacgctcccctttttgtgtagggaagagttttttaatttttttgttatgtgcatcctccttcttttcaataaaaccgttcttttccagtttctttatcgcacgagctgccgttgtacgatctacttttatcatctcggctagtttttcttgaatgatgcctgggtgttcacagatcctcacaaggtataaatactgtccttttgtaaggtcatattctttaaactcgatattgctaatagaatctaatgcccttgctatcattccaatctcacggagaatgtccttcattatgaaaactccttagtagtatttttgttgtaaatgcaacaaaaacaatgtgtttattttactcgaattttattgtatttgcaataaaaaatgatcataaagtagtcaagggtacgagcaaagcttccgagtcacacacgggcattaagttaagcgggatgattcatcaccaaaacaaaatgaacatcattagacagtttcccgatatttttcacgccattgcctaatgattttaggctataatggagcaacgacattagatcggttgtttgcctagagagaaaggaacgtccagcaaacgtgaaaggagaggccatgtcgcgttttgttaaaattgccgttgttgttatgctgctagccgcagctattggcattattgcgtattcaagctccacaccatacgccaaccaagacatgagaggcatccttagcaggctgccgctgtcgtggctggaacagacatttatcggccagatttcttttgtctatggcggaaggccagttggcattgctcatacaggcgtagaagcgtttgttgaatttttcttgcgcaaaggggcccattttgtttctttcttcgtgattggcgctttggcttgccggttgtttgcgtacatcttccgtctgcgctttgcaagttttttcgccctcctattcgttatgggttatgcttccttcgatgagtacagacaatcgcttgtaccagatcgaacgccattagtggaagatgttttattggatacagtaggtggaataacaggcattttccttgtagtcgtatgggtgtctgttcgaaaaatgaggcaaagccgaacgcttcctccagtaagccaagagccgcgcacgagaatggaacgcaggcaacggcaacgcgcttagcaaagagacagaaagaagcggcagcccagcgatatcgcaggctgccgctttgttttatggtgccgttggatttgctgattcgttcgtgtgtgctgccgtataaagccgttcatgagagtgattgttgtctttatcttttaatcaatggttgttcttcaggttttgcacaagcgcagcagtttttttgtgcttttcaaagtggagcgctttttcaaaaacacggtatgcttttttctcgccatgaaaccggaacatggcgtattgatggagttcaaatgtcttttctatttcaaataggttaatggcttctttcaggttgtctgctcgctggtaaaggaaatacgttttaaatttttggatagcatagggctttaaatagtaaggtggaatatcggtttcggaaagaagctgttgaagtgtttctctggcagccgctttggccgaatcgaactgttgctttgcgtgttctagtttttgcttatacaaacggctgtgtttaatgagtcggttcataccatacattcctgcaaagtaaaggaaaagaggcgttaaaatgaaaagggacaaaaacagcaacgccttgtataaaaagaaaggcaaagaaaggagttggaatacagcgatcagcctattgccaaataacgtgtgaaagaaaaaaaggaatagaatgatcgcacaagcaaaccaagtgttcagatagcgtgggagaaaaaagtgacgcagcggcccgcttgtcagttgctgaatctgttccaggcactgcccctcatctccttgtgctcgttcgttttgttcaacgagcacttccagagactgaatatgggcaagccattgcttttggttcatacgatcccgcctttccttgttcttgtccagttgttttatttttatgatgtccgtttggcaacaatgactgttttcgcaagaagttcttgttcctcggtattttcatgtgaagcctgcatatagatgattccagaagaaaggagagaggtaaagatggaaaaaacggttacggtcggactcgaacatggcctccatgcgaatgctgcttcggcatttgtccatgaagcagggcagtacaaagcggatgtctaccttaagaaaggaaattcaacgattaacgccaaaagcattcttggcttaatgagcatcgttgtccaaaagggagatgacgtgttgttgactgccgaaggtgcagatgaggaagctgcgattgaaggattaagcagatttttagaaggaaaataacggagaagccgatgccgcgtgcatcggcttttttttatttaaagaacgattcccttccttgtagtaagcaaaagtcttgggtccactttgccacagctagagaaaagagcatcatgtcctttttctgaaaaaagatttgacaacgctttctcgagagaatacaataacaaataagtttatatcatatgatataacttgtaacatatgttacgtaatttaaactaataccatgatgtgtaacatatgtaaaaggagattcgttctaaaaacgaggaggaagatgtatgtccatttatcgggaattacaagagcgtgataaacaacaacagccaatcaaagtgggagtaatcggtgccggtcaaatgggattcggtttaatttctcaaatctctcggatcccaggaatggtcgttggtgggatttgcgatgtccatattgaaaatgcagaaaaagcccgtgatttttaccgttctcaagaaaatagaaaagtggagacggttgtttcttctgattaccgggcagttatccaatcaaatacagtagaggtggtcgtcgatgcaacgggcgtccccgaagtcggtgccaatattgccttggaggcgcttcgttcaagaaagcatcttgtgctgctaaatgttgaagtagacattacgatcggatcatatatgcatagcatgttcgatgcggctggtcttgtctattctggttcagcaggggacgagccggcagcaattgtagaactttatgaattcgcgaaaacaatgggactagaagtagtcgtagcaggaaaaggtaaaaacaacccacttaagccaacagccaatcctgacacatgtgcagaggaagccaaacagaaacatatgagcgcacatatgctggcagcattccaggatggcacgaagacaatggctgagatgaatttattgagcaatgcgattgggcttgtgccagataaagtcgggatgcatggagtcgacgctaacttagataatgtcgctaagaagctagatttgaaagaacacggcggcgtccttgattcacttggtgttgtagaatatgtaaacggtttagcacctggggtgttcgtcattgtcaaaagtgagttggaacctgtagatgaagaactgcgctacttgttaaaagtcaacgccaaccatggaccgcattacacgttataccgtccgtaccatctggcaagcttagaaacacccattacgattgctaaggcagtgcttcatcatgatacgtcgattcatccccttggtgcaccggtttctgaaaccgtagcagttgcaaaacgcgcgattcagccaggtgagagactagatggaattggcggctatagcgtaagaggcatgttggaaacacatcaggatatgaagcggaatggccatataccgattggcctaattagtggcaatgtggtcgcaaaacgagccattgaagaagggcagtttttaacgatggatgatgtcgaactcgacacaatgacgaccgtttggaaactgcgtgcattgcaagaccatttatttgctgaataacaaggagaaggtggatatgaagcttgtactaattgcttgctgtctgttgctcattcaatcagcgttgactgcaatccaagttcgctattaccaaaaatcgatgaaagcactagttggaaaatataaaggggaaaaggggtaccaccttttctcaggacaatcccgccgtcgaatcgggcctggttctatcgttctcttagtagtagatgagtcttacatcatccaagagtgccagtgtatgcgaggggtaagcattctgtctacgtttaaagagatggaagaatacgaaggaatgcacttgggcgagctgttggacaggcttcacacttcagaaaaaaaacgcaagtctcctgcattgcaaacggccttacaggcagctggcgagcaagcactcacagcgatttcaaagacgaggagaacgacctcgatttcttaaaaaggagtgaaaaagatggactggattgaatggttcggcgagcactttatcggcatgtttaatgcaggtggagaacaattcatgaatctccttactggcattgtcccaacgctagtcgttttactaactttcacttacgcactaattaaatttatcggggaggaacgggtcacgaaagcgattcgtttcacttcaaaatatgcactactacgttacacccttatgccaattctatcgattctattgcttaccaatccaatggcttacacgtttgggcgttttgtcgaagagcgccaaaaacctgctttctttgattcgctcgtgtcatttttgcatccggttacagccttatttccatacgcaaacgctggggagctgtttgtctatctcggcatagcgaatggattgacacaagcagggtactcgacgtcagagttagcagtgcggtttttcctggtcggtattctggttatgctgatcagagggttactgacggagcaaatcacaaaatacctgatgaagagaatgtgacaggaggggaaacggcatggcatataaagccgtatttatcagcaaaggctcaggcgggtgggggactggcctccgcattgaaccgaaagggaaaaagacgaaagtcgtgtcaatcacaggcgggggaattcaccctgtcgcccaacgcattgctgaattgactggggcagaagcagtcgatggcttcaaaaattcagtcccagaagatgaaatgatgtgtgtcgtgattgactgcggcggaaccgctagaattggactatacccaatgaaacgaattcctacagttgatattctcgcttcttctccatcaggcccattggcaaaacatatcaaagaagacattttcgtctctggtgttacaccgaaagaagtgtctttggcagaagcaacagaggagaagcacgatttagcccctgcagaggaagagaatcgtttcaatccagcaaataaagaagaatttaaggaagagtacgaaaaagtcaaaaatgagcatcgttcccaaaatgataactggctcatgcgtttttcaaaggggatcggaaaagtcactggtgtattttatcaggccggacgtgattcaattgacatgcttattaaaaatatcatcccgttcatggcttttgtaagcatgttgattggcattatcaattacacgggtatcggtgatttgattgccaatacgatgtcgccgcttgctagctcgatttggggcttaatcatcattgtgatgatctgcacgctgccgtttttatcgccagtgctaggtccaggggcggtcattgcccaggtaatcggtgtcttgatcggtagccaaattgcgcttgggaatattccgccgcaatttgcgttaccagccttatttgcgattaatggccaagtgggagctgatttcgtaccagttgggttatcattaggagaagcgaagccggaaacagtgcagtatggcgtgcctgccgtcctgtatagccgcttgattacaggcgtgttggctgttgtcattgcctacgtagctagttttggcatgtattaaggaggaaaaagaatgtatcaaacaatcgtaaaagaaattggacagatggccccctcttttgcagacgacaaaatcgtcattctttttgggatggaagcgccagtagaacttaaggaaatttcattcctccaccaagtagacggggaatttgaagacaaccccattaaagaaggcggtacactcgttattgatgaacaggaatttgtaatcgaaaaagtcggttcggctgcaaatgaaaatttacggacattgggccacatctcgatttactttacagaaccgcaagaagaaatattgcctggtgccgtgtttgccagtccgcatacatttcctgttatagaaaagggtagcaaaatcacatttaagtagtacaataatagttggaaatcttgtaatgtaaaaccacaggatagggtggtcaaatgtcacttttgggagatcgaagacttttagtaaaaatcgcccaaatgtattacgaggaaggggcgacacaatcggaaattgcccaggccatcggtgtaagtcggccgcttatttcaaagtatttagcgaaagcaagggagttgggtgtggtagagattattattcatgatcacgacacacatccatttaccggattggaatcgaaagtagaaaaacgctatggattacgggaagttgtttgtgtagaatccaacgaaaatgatgcttctaaagcgcggatgggacaagcagcaagccattatttgttgcggatgattcgcgatggccaaacaattggcatgagctctgggacgactttgtatgaagtggcgatggcattgtcatctagccagcactttccaaacgtgcaattcatccctctcgtcggtggaatgggccatgaaagagtcgacattcatgccaaccaaattgttgccaagctggctgatgtccttaaagcgaagtgcaagttgttgcatgctcccgtactagtcgattcaaaggaagcaaaggagatcatagtcaatcagtcttcgattagagagatttttgagattggcgcaaaagcggatattgccatggtcggcatagggggaacaccagagcactcgacaatggtgaagtcttatctccagcagacaaaaggcgtaatcgagtatgagaacatcgtaggcgatatttgttacaattttatcggagaagacggttgtacgattgataatgattggaatgccagagtcatttcgatggatttagaccatgtaaaacaaattcctcttgtgattggtgtagcaagtgggaaggaaaaggtcaaagcgattaaagccgcacttcgtgcaaagttaatacacgtgcttataacggatgatctgactgcacgaatgctattggatcattaaaacggatgaaggctgttgagaaatgaatttcaacagccttttttcttttttgtcgatgttcagctagctactgtgagatggaacagaaacatgtctgctttggccatcagatttagcgagaaacgctgtccgcaaacgattggttaatcgttttacgggtacaaaagtaaagaacgaggttgatacaccctaaaacgataaagccagcaacgccggtaatcccgttgattagttctgggtttccgcctgcgacaagaatgagtccaattccagctgtcgcattcatgacaccatgaaagaaagcggcggggtagatcgtttttgcttttatcgttataaaacacaaaagcggggacaatagcatacaaaaaaccgtcatcatcaaaatccccaataaaggcgtacttgggtaattgtgtccagccagtgttaatggagcatgccatggcccccacagcaagccaatcgcaaaagacgctttccaaaagcccaggctttttaattcagtcaacaacaagccgcgccaagctgtttcttcgccaaaagcaaagagtgcattgagtgtgataccggcaagcacggcattaatggccatcatccatagtggatgaaatggcaacgcttcaaaagcagcttcagtagcattcctcgtggtctcatccattgcggcataataggcttccatcgttaaggaaaggctcgttcctgggaaaacgagtgcgactaacagtgttgccgaaacgaggaagaatggcaaaaaggcggcgagaacccaccaaagagaaaagcgcccttttaatagcaaagcaggtgcaagtggttgtttgaagatggctttttgcgttatcacggcactgacaaacgggaagagcatataaaccatcgcaaataattgaaaaactagagggtttttataggcaccgctcagcaaaaataccgcccctgtgccaaagctgattccaaaaagaatacaaataaacacaatcagtttctttttattcatgactttcacgtccttgtttttttctgtctatatgatgtacgtatagaagaaagaaaagattcatttctcttgatatacccctatagggtatgttatcgtttagacagatacttcattttagccgagaaggtgaaatagatgagtgagaaaaaagcagcgatttcgattaccggaatgacgtgtgccgcctgtgcaacgagaattgaaaaaggactcaacaagatcgaaggcgtctcacaggcgacagttaatttagcgaatgagaaagcaaccattacctatgacagcaacaaaaccgagccgagcgcctttaccgagaaaatcgacaagcttggctacggcgttcgtcttgaaaaagcggttttcaatgtaaaagggatgacgtgtgctgcttgtgcaacgagaattgaaaaacggctcaaaaaaatgcccggtgtcaaagaggcaaacgtcaacttagcgatagaacgggcaacggttgtttacaatgaggcagaaacaaacgaacaggaaatgattcgcgttgttgacaagcttggctaccaacttgagcgcgaagcggctagttcaggaaacactaaagaagaagaaagccaaaagcgtttcggattgtttcttttttcagcgatcttgtccttgccacttctttggacgatggtgacccatttcgaatttacatcgtttttatatgtgcctgatatgttcatgaatccgtgggtgcaattagcgctggcgacacccgtacaactaattgtcggagcccccttttataaaggtgcgtacaaggcgttggcaaataaaagcgccaatatggacgtccttgttgcccttggaacgtcggtcgcctacgtttacagcatttttcttggttgggaatggtaccagaatgggcaagttggcatgcctgaattgtactttgaagcagccgctgtcattcttacattaattgtgctaggcaaatggtttgaagcaagagccaaaggaagaacaagcaaagcgatttctactttattaggattgcaggcgaaaacggctcgagtgatccgtaatggcaatgaagtcgagttgccgattgaagaagtaaaggcaggcgatgaactcatcattcgcccgggagaaaaaattcccgtcgacggctacgtaaaaagcggaacctcttccgtcgatgaatcgatgattacaggagaagcgctcccagtcagcaagaaagcagacgattcgctaatcggagcaacgctgaacaagcaagggtcgctgcgaatgattgccacaaaagtcggcaaagatacagcccttgcgcaaattgtcaaagtggtcgaagaggcgcaagggtcgaaagcggatattcaacgtatcgccgatagggtgtctggcgtttttgtccctgttgtcgttctcctagcggcagctacttttctgatttggtatacactcattgatccaggcaatattcgcgcagcgattgttccttttatcacgattttagtgattgcctgcccatgtgcgctaggtttggcgacgccgacttcgatcatggctggatccggccgagcggctgaactagggctgttgtttagaggcggcgaacatttggaaaatacacgatccattacaacggttgtcctcgacaaaacgggcacggtgacgaaagggacgccgcaattaacggacattgtgcctgcagaaggaatagacgagaatgagctacttgctatcgtggcaagtgctgaatttgaatcggaacatccattagcgaatgccattgtgcaaggtgctgctgatcgtgccatatccttaagggaggctgaggcgtttgaagcattaacgggctatggcatacgcgcaaaagtagacggtgttgttattcatattggcacacgaaagttgatggaacaggcaacaatcgaatacgctatattagaagagcgcatggaagaattagagcagcaagggaaaacagcgatgttggtaagcatcggtacagacattgctggattggttgcagtagccgatacagtgaaggaaacctctaaggaagcggtggaacgcctccacgaacttgggcttgaagtgattatgctcactggtgataatgagcgaacggcaaaagcaattgcagccgaagttgggatcaaccatgtgatagctggtgtgttgccagaggaaaaaagcaatgaagtgaaacgtctccaagaagacggcaaacgagtagcaatggtgggcgacggcattaacgatgcccctgctcttgcagtagcggatgtaggaatggcgatgggaacgggcgctgatgtagcaattgaaacagccgatgtcacgctcatgcgtggcgatgtaaacagtgtcgctgatgcgtttctcatgagcaaaaaaacgatgcgcaacattaaacaaaatttgttttttgcctttttctacaattcggcggcaataccaattgcagcagctggactcctcgccccatgggtagcaggagcagcgatggccttttcttctgtctccgttgtcgcaaatgccctgcggttgcaacgaatccgtatgccacagagaggagctgccagtcaatgacgactaaacgctggatactagcagctgtatgctacttgatccttgtagtaggaggctacggtttgctaactggaaccaatccgttcgaaagcacggacgttcatgagagcgagcatcacgagtgataaattcaatgagcaaagctcaagcccctggccattcgccaggggcttgttgtgcaagtttttagttgagagcggcacggaagtaaagcagtctcgtgatcaaaaagtaaatcaattgcaaggcagcataaatggaaatgaccaagatcgcgtttagtacgagattgacatcgagcatgttgctgagcatcacataggcaaagctggcatggacgctgccgacaagcacaggtacaaagaaaaggaaacccatttgtttatccaagatcctgcgcttttctttgtctgttaagccaatccggcttaaggcaaacaattgttttttcgtatcggccaaatcggtaaacaatttcaaatagagcatgcttccttggacaatgaagaatagcaagctgacaaacaagccaataaacagaactaaggagtacatttgcagcagcatatggtattgatatggcttagcttgcaatatataaccatgttctcctgttgcttccataattgcctcggatacgtccgtttcattttgccaatcgtcgagttcataggcaatgaaacgttcggtttgaatgccgggggcctgctccgctttggcaaacgcttcgtctgaaaggataaaggtgctattgctactaaacagaacctcattgtgtacttcaagatccgtaaaggtttgctcagactcgccaaacgtaattgtcagttcatcaaattgagcgggggcaaatagatcttcttgactaaaagcaataatgtcattgcctgctaatgaaacaggttctaaaccgatgtcttcgctgagacggttaaaggtgctttccgagatgactgaaccagacaataccgtctcctcgttcaaatagctcggcgtgcctgtaaactcaacgtcaagcatttgctcatcaattttaaacaggacttcagagccgtattctgccagcaatgattcaaccttttcggtcgtaataatatcggcctcatcgtccgtttcttcaaccgtccagaaaatcgagtacggcatattccccattccttcgttgaggatcgcattaaaaaacatataaacggttcccgaggctgtcaggacgacggcgctaatgacagatgtcaaaaacaacatgcgtgcgtaatcttttaagcgaaacaaaatgtttgtccgcgtaattaaagtcgtgcctgagtataaagagcgtttgttgcggtaaaggcgattgtaaagcgctactgtgccttgggtaaagagaaaataagtgccgactacaacaagccctaatactggaaacatggttagcatgacggtcatcatgttggtggtgacagctagcccatagccagctgcaaggcaaatcaccgtaagcacggtgagccaaatggatgtctttggcatcatctttggcttgcttgcttctttcagcatttgaatcacttcttggttgcgaagtttccaaaatgaaaggagcgagagaacctggaataataagaaaaagccaacgcctgttacaagataagctacaggcacgaacttgaacgtaatcggcgcgtcgacagcaagcaacatggtcatgaacatcaaaaataatttcgagaaaagcgtgccaagcagaagtccgcagatgatggcaacaatcgagataatcgtttgctcataatagacaagagagcgcaactggcttctattcatgccaaaaagcgttaaaagcccaaattcctgtgagcgaacttgcaaaaagacattgttcgaataggcgataaaaaagatcgaaaataagacaatgattacttgtgctgccaccatgccgtttttgacgacctggtgcatgctttcctcggcgacgtctgggtgaaaaataaactgagcatagataaaaaagatcatgacggtgaacacgcaacttagaaaataagcagcatagcgttgggcgtggccagtaatgtttctacgggcgagtgtgcgtagattcatggaaatcgccccctaaaacgctaagcgtgtctaagatgttttggtaaaatgtttgttggcggtcacctttgcgaatttcggagaaaaaggcgccatctttgataaaaatgatcctgtcgcaatagctggccgctgtagggtcgtgtgtaaccattaaaatggtcgcatcccgttctttattcattgccgtaagcgtatcgagcacttgccttgctgcttttgagtcaaggtttcctgtcggctcgtcggctaacaccattgccggttggtggataaaggcccgtgcacatgccgtacgttgtttctggcctcctgaaatttcagacgtacgcttatccaaaatggaagcaatgctaagcaattctgcaatattggcaaggcgtttttccatttctttgtatggcactttgtccaatgccaatgggagcaaaatattttcacgaaccgttaaagtgtcgagcaagttaaaatcctggaacacaaagccgagttctttgcggcgaaaaagtgctaatttgttgtttgacagcgttgccggattggtgccgttaatgatgatttcgcccgctgtcggtttgtcaatcgttgctaacatattgagcaaagtcgtttttccgctgccagacggacccatgacaccaacaaattcgcctttatctacttgaagttggaaagggagcaatgccttataggcgagcccttcctttttcggataataggttttcgttaaatttttgacttgaagaatggacatcgtgcgttcctcctatcacaacgtttgtgtaatcagtatagaaaagaacgactgcgtttcccattgaatcagctttcaaaattctatgtttagcttacatttttgtcatgtttgatgaagtgtctttgaagaaaaaacaagtgtagccgtcgtgcctttgcctggatcagaatgtaaatagagcctgtggccgagctcccgggcgatcgtttgcgccaaatagagtcccattcctgtagactcttggtagcgtctgccattttcgccagtgaaaaacgggtcaaacacacggggcaaatcttttgctgggatgcctacacctgaatcggctattgaaaattcaagttgatgatgctgttttttaaatgaaaaacggatgcgtgcttgttgcttttgcggtgaatattttaaggcgttatgcaaaagttgggcgatgacaacgcgcagccacttgctgtcgctagcgacgggttcagcttcctcagcatcaagttctggaaaaatgccacgacgaatgaactggcgcttttcctcattaatgagctcccgagcaattgctgcaggatcgacgagctccgcctttaagtcgagagaaaagtggtcgagccgagcaaggtggagcatcagttcaagaccatggcggaagcggtcattttcggcacttatgtcgtcaagccattctttgtcagttagtgtttgttttccctcttgaatgagcaaagatatgacggaaacaggcgttttcatatggtgaacccactgattaataaacatttggtgccgcttttgcgcttgttcaagcctctccacttctcgttgaatgtcttcttgtgctcgcttatgaagacgaagccatgcttgcgcttcacgagaaggaggattggcggcctccaattcatagcttgaatcaagagctatcgttttttgatgagcgagccgatgcaatttctttaaatacgttttttggtggagataatcgaccgccagccatacaattaagaaaaagctagtcaacaacaacaaataaaaggcaattggcgcgttgatctgttcattgcttatatgcatatacaacgatgccgccaagatgagcaaccctgtgttcatgtaaaaaaacaaaatcatcgctagacggtcttttaaaaacgtacgaatcatgaggatcgcccaccccaattgacgtccagccgatatccttgcccgcggatcgtttggatcgcattagtgatgccaagttcttgcaggcgctttcgcagtcgtgtcacatttacagataacgtattgtcatcgacaaaatcaacttcatcccacagcgtttccaagagctcgtcccgactaacaatcacatttggcgattccgctaaacgttggaacaataaaaactctttcttcgttaattccaatttggcatcgttatagacgagttcatttcggtcagggtaaaaataaaggttgtctagttctcttaccgtttgctggatgtcacgggcatgggcgtactccccgtaggatcggcgcaaggcgctttttactttagccagtagcacttctaaatgaaatggtttcgtaatgtaatcatcgccgccattctcaatcgccatcacttggttcatgtcgtcagtccgggcagagataaacaacaccggcgcattggaaacagtacggatttgcctacaccaataaaagccatcataaaggggcaaattaatatcgagtaagacaagatcaggctgaatcgccacaaattcctgtttgatcgtttcgaaattctccgcccatgtaactcgatagccgtaccgttctaaatggtcagccataatccggcgaatttgctggtcatcctcgactatataaatatggtacatataaaccatccttttcttacacttttcactctctagcatagcatgtccacctgcaaaagggggcaatcatctgtaggtgtttaaaatctaggaaaccgagaatcataaagtcgcgaaaaacgtgataagggttcttagcgtcgagccaatagccatggatgaacccatccgtgtggaaagaagtcgtttgtcctcctttttcaattgacgtgtggctggtacactgtaagtggaggtaggataaatgatgaactcagttgcagaaacactcattagccagatccaagcacaggggaaggaatttattagcgagtggcagtttgaaggctacattccgatggacgaaggcgtgcttttgtatgtaaaaacccgtcaaggccagccggttgtcattagcctcaaacaagagagtgaagaccgctatcatgtggaaatggtgcgaaataatgataagtttgaccgcatcgttctaggcggcgactacgacgtgccggaatctgagttggctatgcgtattgatatgttgcttggcgctgcgaaacattaaaagcagcgcctttttcgtttctactgtatggattgggtagcatcggttcgtttcacttgcgtcttttgttaggggaaagcaccgttcgtttttctgagatgcaatcttttcactgcgagtctggcaagggaatggtatactaacagaaaaagctctagtgcagggggaacgaaagtggaacaagtacgatatggtggtttagaagcagggggaacaaaaatggtgtgtggcgtcgccaacgaaaaaggcgagtggttggcgaagctgacgattcctaccaaacatccacaagaaacaatgccggagattatcgcgttttttgaagaacaacaaattgatagtttagggattggcagttttgggccacttgatcttgtaaaaggatcttctacatacggctcattggcaagtacgcctaaaaaaggatggccaggttattcgcttcttggtgcttttgctcatttgaacatccctatctcaattacaactgatgtaaatggagctgcgcttgctgaagcggcagtcggtgctgccaaagggctcgacagttgcgtctatattacagtcggtactggtattggcgctggcgcagtcgtaaatgggacgattttggaagggcttagccatccagaaatggggcatatccctgttgtgcgccataaagatgaccgctatgaaggcaattgcccgtaccacggtgattgtcttgaggggcttgctgcgggtcccgctattcaaggacgatggggcaaagccggtgtagagcttgccgaagtgagcgaagtatgggaaatggaagcatactatttagcccaagcaatcgctacctacacatacgtactgtcgccaaagcgagttattttaggaggaggcgtcatgaaacaacgccacttgtatccgctaattcgccaagcgttggctacgcaaatcaatggctatgtaaaaataggcgatcttgaggaatatgtggtgcctccaggactcggcgatgacgcgggccttacaggagctgttttacttgctaagcaagcattggtacaaaaggggcttaagtcgacaaacctatagccaagcaaggcaaatcgacagagaaaaacgcttagcggaagaccgctttgcgttttttctacaaactaaaatagaggaagcggggatggcgatgtcagaacggtacccacatgcaaagcgtgtctatcaattgacgctggagctaatgaagcagcctagcatttctggaacgacacaagaacgggaaatggctgaccgcattgttgcggtgctagagcggattccttattttcaagcctacccgcagcacattaaacgcgttcctttaagaggcgactctcttggccgggaggcggttgtcgcgctattggcgaaagcgcctacgacaaaaaaagcgacgatgttgttaagccattttgacgttgttggcgtcgatgattttgggatgtataaagaggatgcgtttacccctgatttgttaagagaaaagcttttggccgagcaagagggctatcttgacaaggacgcccgccatgatttggaatctggccattacttgtttgggcgcggcagtatggacatgaaggcaggacttgcgatgcagctgtccgttttgcaagatatcgctgatgataaagacgctaaagccaatgtgtgccttgtcgccgtgcccgatgaagaaaagctgtcgatgggcatgtttgccgctatccatgaattgagagcgatgcaggaagacggctggaacttccacgcatgcatttgttcggagccgaatttttctgcttatccgaatgattggaacaaatacatttatacgggatcaacaggaaagctgctccccttcatttactgtatcggcaaggaaacgcatgttggccaaccgttggaaggcattaacgctgctgtcatggctgcccaactcgccgttgaaatggaatggtcagagcgtttttcgaatcaagtcgatggggaagtttctccgtcgccaacatgtttgcgcattcgagacctaaaggaaacgtacgatgtgcaaacgccaaacgaatcttatttattttacaatgtgttgacgctagactcagggccccaggaagttatggagcgcgtaaaagaggcttgcaacctggctagcacgctcatttatgaacgtcttctccgccatcgccaagcatttggcgatgaatcactgacagcactagtgaaacagccgcaagtctatacgttaactgatctttatcagctcggagtccaaaagtatggaaaagatgcatttaaggacgtttacgaagaagcgttatcagaaagtgtagcggaaaaggctgattatacgacacaaacacttgcctttgcacggcgaatgtcagcccattttttagacagggcgcctttttatcttttgttgcttgctccgccttattatccacatgtgcgcctagaccagaaacaagatcaacgtttgttggcacttgtagatgagcttaagcaaatttgcgccgatcagtttggcgagcgccttgtgcaaaaaacttttttcccaggcctctctgatgtaagttattgccgggtaacgaaagaggcagctgctccagatacaggcttgaaagaacatatgccattatacgaacgaagttatcacattcctttaagggaaatcgctgggcttgatattccaacaataaacttagggccttttggcaaagacgcccataagcggactgaacggttagaattgacatactcaacggaagtcgccccagcgttgctccttcacgctgtgaagcggctagcggagcaaacagaatagcaaaaaagagcgatgtcctctgttaaagagggacacgagagggcgccacttattcaggcgccttttacaggctgtaggaaggaagtagaagaacccggctatttgtcgtaaattgtgataagctaggcgtagtgtactggttttattgaggagattatacatatgaagaaaacaaattcgacttcctttgtaacagcgggtttgctactaggcatttttatggccgcgatcgacaacacgattgtagcaacagcaatgggtacgattgttggtgaccttggcaattacgaacaatttgtatgggtaacggctggctatatggtcgcaatgatggctggtatgccgatatacgggaaattatctgacatgtatggtcgaaaacgttttttcgtatttggcttgttgatgtttttgcttggctctgttttatgtggcctgtcgcaaacaatgaatcaattaattgcctttcgcattattcaagggattggcggcggagctctaatgcctattgcctttacgattattttcgacctctttccgccagaaaaacggggaaagatgactgggcttattggcgcggtgtttggcctttccagtgtcctagggcctctattaggtgcgtttataacggaagcgttaagctggcattggattttttatattaatgtgccgatcggggccgttgcgctttttttaattgcccggtattacaaagaaacgatggaagcgtcgaaacaaaaaatagactggcttggtgcgggatcccttgttcttgcagtgagttgcttaatgtttgccttagaacttgggggcggtacgtacagctggggttctccaacaattcttttgctgtttgcggctgcagcggttctgtttaccttgtttacgttcgcagaacggaaagcagaggaaccgattatttcgttttggatgtttaaaaaacgtctgtttgccacgtctcagctaattgcctttgcttacggcggcacatttgtgcttttggctgtgtttattccgatctttgtccaggccgtattcggcggtactgcatctgatgctgggacaacgttaatgccgatgatgcttggctctgtggttggaagcatgattggtggagcgctgcagacgaaaatttcgtttcgggccatgatggtattttcaggcgtctgcttttttacaggtatggcactgctagcgacaatggggacggatgtcacaagaattgcattggcgttttatatcgctttagccgggctaggcgttggcttttcgttttcgctattgcctgctgcttccattaatcaattatcgccacggttcagaggttcagccaactcaaccaattcgtttttgcgctcatttggtatgacggtcggtctcgccgttttcggtacggttcaaacgctttcctttaccaaccgattaaacggagcatttaaggaagcgccaattcaagtggaaaatcaaaacttacaagaattgtttaccccagaaggcagagcgcaaataccgcctgacgtgcttagtacgattacagaagcgatgtccgattcgattacgtttatcttttcccttgctctcatcccgatcgcgattgcactagtagcggccttctttatgggcaatgacaaggtggagacaagcaaaagcatgaaacggaacccgtcctcgtcggaaacatagcataaggagaatgaagcaaggagactgcacgaatgtatggtgttgtcttcttgtctatttattagggaagtcattgttagctgccggcacctcggcaaatccaaaagttataacttgacaaaaaaatttgttcatgctataattgattattattgtttttgttgtataatgggattctcctggccaggggaatcctattttttttgaaaacgaaggagcgtgtatggcttgcaaaaggggagtcctagtttaacttctattatttcagcatttggaagggcctatcatagtcgctttgatcaaccgaagatttttgatgattatttagcggaacgtttgatctccgaagacgaatatgaggagatcaaggccaacatgattcaggggattggtttttttaacgaagaattagcccaaaaatggaaagggcattcggaacagatattaaaatggattacccaagtacaactatctccgacgcctttagcgcgtgccgcctattgtgaaggtgtgctcctgaatgaagtgcggctaggggccaaacagtacgtcatccttggtgctggcttggacacattttgttttaggcatcctgagctgcaggatacgttagacatttttgaagttgattctcctatgacgcaggaatttaagaagaaaaagctagagcaagctggttttgagattccgagccaccttcatttcgttcctatggacttcagcaaggcattttctgggcaaccattaatcgaggcgggatttactggcaagaagacgttttttagccttttaggcgtttcctactatttgacgaaggacgagctttcaagcttgctagcacatttgtttgcccttgtgccaacggggagttcgattgtgtttgattatgcagatgagacgctttttgaagcaaaaggggtttcaaatcgcgtcgaaaacatggtgaaaatggctgctgctagtggagagccgatgaagtcctgttattcctatagtgaaatggaaaggctattggaacaatgcggtttgcttatctatgagacgctgacgcctgagaaaatcaacgaacggtacttttccaacaggcaagatcatttgtcggcatttgaaacgattcattatgttcatgccgttaaaaaataaaagtgaatggcttataaaagtagcgaatgagagaaaacccatggcgattgccatgggttttttatatcaaatctgattttttgagaaaacggatgaaaccagcctctcctgagtcggtatctttaaagacgccagcatgggagaggacagttgtaaacaaccgacccacttcttgcttaaggagcgcttccacattcgctgttgtaaggttcggcttttgctcttttagcgaaagcgcccactctttgtgttttgcaatggcttcattttgcgcaatttgttctgccgcgttagcactcggtaggacagtcgctagctcagctagttcttgttttaagcgcccaggcaatacggctaagcccattacttcaatcaagccaatattttcttttttgatagcgtgcacatctgcatgtggatgaaataacccaagcggatgggcttttgtcgtccggttattgcgaaggacgagatccagttcaaacatgccgctcttgttgcgggcaattggcgtaatcgtattatgaggagttccgtcactatttgcataaatgtcgagcgatgggtcgctgtacgttttccaagccgaaaggatagcagtagccgctgctttcaatgatgctgggtctgcgctagcgagacgaatgacagacataggccatttgacaatgccagcttttatggttggatatccttttaaagtaaaagcctttttcaacggcgctttcgccattggaaatgtatgttttccgccttggtaatggtcgtggcttaaaattgaaccgccaactattggcaaatcggcattggagccaataaaataatgagtgtattgttggacaaattcgagcagccttgtaaacgtgtcggcggtaatctgcataggccgctgtttttcgaaaagcacaatggcgtgttcttcataatagacgtaaggagaaaactgcatataccactgttcgttgccaagtgttaccggaattaagcgcaagttttgccgggccggatgggtagcccgaccggcaaagccaacattttctttggcaagaagccctttgggatagtcggacggagctacctttttggcagcggcaatggcaacagggtctttttccggcttggatagattgatcgtgatttcaaggtcgccataaggggtaggtgcaagccaactttcatttaaggcgatcctgtctgtgcgaatgtaatgggcatctttgcaaaactgataaaacgcggcagtagccgcttgtgggccttgttgttcgcacatacgaaaaaaatgatcaatgaccgtactgggacgcggcaaaagcgcatcgatcaattttgtgtcaaataagtcccggtatgtgaccgtatttgcttcaaggagaccattgtctgccgcccaatcaagaatcggggcaaggatgtcgtaaatgggctcattggtctcagggagcgtttccccgatcattggcgcatcgaggccaaggcggtctagtagctggtttcggctatagtccacatcagcaagagggagcagttttttttgaacgccgtaagcaagcaatttttcaatttgtgtgtaaatctgttttttcatctggttgaacctcaatctgccgcagtggccaaaggcagttcggttacgccatcaccggcgcggctaatatagaagcttggttgaaagccaaattcgctttcgtagccttttttaacgtgtgcttgaaacgcttccattttgtctgtttgtacaaggctgacagtacagccgccaaatcctgctccagtcattcgtgtgccgatgcagccaggggctctgtgttgcaactgatataacgcatcaagctctaagccagtcacttcgtaatcgtttgccagcgattgatgagattcattcatcagttgcccgaagtcacggaggtttcctgcttttagcgccgttacggcttcaagcacacgttggttttcgctgacaacatggctagctcgtttggcaactgtcgccgtcgagaaagcgtggtggtgttttgcgagcaacgctggtgtgacatcacttaatgtacgaatgtcaagaccagctgcttgaaggtcagcgagcgcttgttcacactcggcccgtcgttcattgtatttggagtcagctagccctctgcgtatatttgaattggtaatcacgatatcgtaattgcccaatgttaatggcacaagttcgtactgcaacgagtccgtttgcaaaaaaagcgcatggtcagctttgcccatgcccacagcaaattggtccataatgccgctgttcacaccgataaagttgttttcaacatgctggcatgcttttacaaggtcgaggcgatcccaattggcgcctgtaagggaagagatcatataggctgtcaccatctcgatcgaggctgaagaagacaatcctgccccattggggatgtttccaaaaaaataaagatcggcgccgcctaaatcaaaaccatgatgttgaaaataagcgatcacgcctttaggataattgccccaatcatcttctttattgtacgaaagttctttgtttgggaaagcaacccgttggctgaaattttggctcgctaaacgaaattcattggtgtttgtgcggcggactgctaagtaagttcccattgttaaagcggcgggaaagacaaaaccaccattgtaatcggtatgttcgccaatcaagttcacacgtcctggcgcgaaaaaaagctggtctggcaaagtgccaaaaatcgtttcaaattcagcggcaagctcattcgtattcatagagtcactccttttaacgtaaaaagacagataagcaagtgtgatttgacagcggttgcaaaactttctatgattatatcaacaaaaacgaacaataacaaacactttttaacataatagaggtgcaagcaatgttaaaagaagaaagactgcaacggatagtaaaaatgcttgaacagagtgacatgattaaagtggcagatataatgaaagagctgcaagtggcagatatgacagtgcgtcgtgatttgcaggcgcttgaagaagcaggattgcttgtacgtttacatgggggagcgacaaaagcaggctacaaagagcgatctaatacagaaaagcagagtttaaaccaaaaagaaaaaaaggcgattgcgaaacaagcagcttcactcattcatgaccatgacacagtctttctcgggcctggtacaacaaatgaatcgatgcatggatatattcaggctagggacgtaaaaattgtgacgacttcgttgccgatttttatgaaatttaaaggcgatcctcgatttgagctattgttggcgggaggagaataccgtgaacggactggctcattcattggcgctctagcaaggcagttgttaggggcactgcggttcaataaagcatttattggcacgaatggcattcatggaagtgaagtaacggcggctaatgaagaagagggggaaggccatcggatcatttgccatcggactgaacagttatatattacagcagaccatagcaaatttggagtaagcgcgttttatacattttgccatctgcaagagacgacggcggttattaccgatagcatgcttgataaaaacacgttgaaccagctgaaaaatcacacacaagtgtttacagctcaaatgcgagagtaagcaaaaaaggatagggacaaggattttggcaatcttacacaatgctttaaaaagtggctaaccccctttgttagctgctttaaagacaaaaggtgctgttattataatccaatttatttccaatttccgttgctagaaaacgattttccgaatataatagttgactagttatgagtgttttatgcgatcgaaataaggaaattctattggaaagaagagatgcccaatgtcaaatttaaaaagattggcttccaagaagctgatgtttttttggcttgctctatttttatattggctcaaaacatatgtgacgtataaaacagaatttaatttaggggtcaaagggccataccaggaattgttgctcgccttgaacccattaagcatgggtgttttattgtttgggttggccttgtttgcaaaaggacgacgttccaacgtatggatcattatttttgcttccttgcttggcgccattctttatgcaaatgtgttgttctaccgctttttcgatgactttattacgctgcctaacgtgatgcaggcatccaatttaagcacgatgtctggaaatgtgtttgctgccatgcgttggtatgatctatggttctttttcgatgtagcggttttaattgccctctatttatggaaaagggaagttcctgagatacgctttcgcaaaagcgtggccacaactgcgattgtgacagcaattgccctattcgtcgccaatttggctatggcagaaatcgatcgtccacagttgcttgcacggacgtttgaccgcaactatattgtgaagtatttaggtttgtataattacaccatttatgatggaatacaaaccgtgcaagcggaatcgcaacgtgcatatgcaagcagcgatgatttaacggaaattgaaaattacacggtttcccgtttcgccaagccgaatgaggactactttggcatcgctgagggcaaaaatattattaaaatccacttagagagctttcagtcgtttctaattgattatgagctgaacggcgaggaagttacgccatttttgaattcattagccgccggggctgaggatatgacgtattttgacaactttttccatcaaacaggacaagggaagacagcggacgcggagttgatgctagatactggtttatttggtttgccgcaaggttctgcctttgtaacgaaagcgcaaaatacgtaccagtcgcttcctgccattttaaaccaggagcgcggccacgagagtgcggttttacacggtgactacaaatcgttttggaatcgcgatacgatgtataaacagcttggtatcgatcaattttttgatgcaagctattatgatatgagcgaagaaaatactgtgaacttaggcttaaaagacaagccatttttcgaagaatcgattccaatgcttcagtcattggaaacgccgttttacgctcatttgatttcgctcacgaatcactatccgtttaacttgggtccagaagacgcaacaattgaacgggccactaccggagacaatacagtcgataactattttcagacggcccgttatttggatgaagcccttgagcaattttttgctgacttaaaagcgtcaggcttgtatgaggactcagtcatcatgatttacggagatcataacggcatttccgaaaaccataaccgggcgatgactgaaattctaggcacagaaatcacgcctcaccaaaatgctcaaaaccaacgagtgccgttattgattcgtgttcctggcatggaaggcggtgtgaaccacacatatggcggggaaattgatgtgatggcgacactcctccatttacaaggcattaacgccaaaccatatgtgcaatttgggacagacttgttttctgaagagcatgatgatatcgtttcgtttcgcagtggcgactatataacgccagcatatacgtccgtcaatggcgttctttacgatacagagacaggcgaaattctagaaccgacagaaaaaacaactgaaattcaggaaaaagtcgaccagcaattagattactcagaccgcgtgctttacgaagatttgcttcgtttccatgcgatcgatggctttgagccaattgaaccgactgattatcattatggcaatccaaataaagaaccggcaaacgaagatcaataaaagaaccagcggaagctggttcttttcatcgtttgacaagcgttttctaccagtctgagggcggtttcgactttgtcgacatacctgctcttttttagaacaacaacgataaacagtaaaatgagcgttttctgtctaaataaactttgacaacggttccgcgatcatgtatattaccctatgggcgaatgatttttgttcttttattctataacattcgtttttaggggtgtaaatgatggaaaacgtttttgactatgaagatattcaactcattccagcaaaatgcattgtaggaagtcgggctgaatgcgatacaagtgtagaacttggaggccgtacgttcaagcttccagttgttccagcaaatatgcaaacgattatcgatgaaaacattgctcgttaccttgccgaaaatgattatttttatattatgcatcggttccagccagaaacacgtcttgcgtttgtcaaagacatgcatgaacggggattgtacgcatccattagtgttggcgtaaaagaagaagaatacacctttgtgcaacaattggctgaccaacatgtagtgcccgaatatgtgacgattgatatagcccatggccattctgaagcggttatcaacatgatccgccatattaaaacacacttgccggatagtttcgttattgctggcaatgttggcacgccagaagctgtgcgcgaacttgaacatgccggtgcagacgcgacaaaagtcggcattgggcctggaaaggtgtgcattactaaaatcaaaacaggcttcggcactggaggctggcaacttgcggcgctgcgctggtgcgcaaaagctgcaagtaaaccaataattgctgacggcggcattcgcacccacggcgatattgccaagtcggtccgttttggcgccacaatggtgatgattggttccttgtttgcaggccatgaagaatctcctggtgacacgatcgaaaaagacggcaagctgtataaagagtattttggttctgcatcagaataccaaaaaggcgagcggaaaaatgtcgaaggcaagaaaatgtacgtcgagcataaaggttcgttagcggaaacactattagaaatggaacaagatctccagtcttcaatttcctatgcaggaggcaaaaggctagacgcaatccgcaatgtcgattatgtcgtcgtgaagaattctatttttaatggcgacaaaatttattgataaaaaaacaaccgtcttggggatgttcataaagaggatagaaagaatgggagtctgtctttaggcaggctcgttttttataaataaagttttagaagagatctaaaaattagaataggacaaaactgagttatttttcacttgacaagaaaaaagatcgttggaataataaatttggaagcgctttctttggaggggagttattctttaaaaaagggacattcttgctaacttagtttatttcataaacaaacaaagtggatcacataattggaggaggggtatgtatgggaaaaagagtaatgattttggctgtagctttgagtttctgtttaataggatgcagcgcggaagaagaagaaaaagagattacgatttggagctttacggatgaaggtgagtacgccgttgaagcatttgtggaagaacacccagacgtaaaagttaattttcagtttattccttcaagtcaatatgaaacaaagctccgctctgctttgtcaacaggaatacgggcacctgatgtatttgcactagaagcccaatatgtgcgaaagttcattgaccatccatcactagaatcgttatctgaagctccgtatgacgctgaggcgttgattgacagccattacgagtatattcaaggcatggaaagggattcaaatggcgatgttcgcgcagttggttatcaaggcacgacaggtggtgtttattttcgcagagatttggcgaaagaatatttaggaacagatgatccaaaagaggttagtgaaatgatcgaaacatgggatgatgtgttttcgattagcaagcgcgtttatgaagaaagcggtgggacagtccatgggttgccaaattggaattcaattgggcaagtgcaggacgcactcgttaaccaagcatgggttgttgatgataaattaatcatcgatcaagcaaagagggacgtgctggatttagtggatcaagcgattgaagcggacgcattggcaatgttggatgattggtctcctggatggactgcttctatgcaacaaggctccgtcttgttttatccagggccatcttggtatttgcaacatgtcttgcaatcaaatgctcctgaaacaagtgggttatggggactggcgagtggtcctgctgcttttagtggaggcgggacgttttattccgtttattctggcagtgataacaaagacttggcttgggaatttgtgaaaatgtatggatttgatgttgacttcttacagaacttagctgtagatgaacagtattatacaagtcatcgcggagcaaatgaaggcgtagcggatgagattacgagcgatttcctagcgggccaaaattattttgaattttttaatgaggagtcagaaaatgtgcaggtagttgtccgttcatcatttgatggcgacattaatgacattttcaatgaacttatgggttcatacgccaagggaaattttcgttcgcaagaagagttttggcaacggtttaaacgtgatgtgcaaacgtattttccagaacttacgattgaataaccttactggctcctaaagctataatccgaggagggttaacatgttcattaaccgcattaataagggaaattgcggatacttttttattgccccgttttttatcgtattcttattgtttggtctatatccaattctctattctttttatttaagcttaaccaattgggatgggctcaacgatccagaattcatcggctttgcgaactacacccgggcgataatcgatccgttgtttcttcaatcactgtttaatacattctttatttggattgtatcagtgatacctcaacttactgtcagtctagtgcttgcagtcattttgacgaacaaattcttaaaaggcaaagatttttttagagcggtgtatttctttccaaacattgtaacggctgcttccctcggcttgctcgtcagtctcatgtttgactggcaaacgggcagtgtcaatcagttgcttatgtcgattggtttcttggaccaggccattgattggaaaaacaaccccttgtttatgcaaatgcttgtgtccgccattctgtttttccagtactttggctactccatgcttatctatatcgcgggcttgcaaggaatttcgccagagtatgccgaagctgccaaagtagatggagcgtcgaaaacccagattttctttaaaataaccgttccgctattaaaaccgattattattttccaagtgatcacttcattaattggcggagtgcaaatctttgaccagccatacatgttaacggaaggatcgggttcgcctaaccatgcgacgttgacgagtgtcatgtatttgtatcggactgcttttgaacaaggccggtttggatatggtgcaaccattgcgttttgtttatttgttgtcattgtcagcttatctgtcatttcctatttggtttcaagaaatagaagcaaaatcgcttaaaagggggagttagcgtgagcaaaggggcattgcctgtaaacgatggaaaactgtctatggaaggacgcagaagaaagcgggctcatctctctctttatacaggattgattggtcttgccattctctgtttatttccgttttacttaatgatcatgtattcgactcatgcaaacgcggatattgcctcaacgtttttgtttttcccgggcggggaattggttaacaatttcacacgcatggtggaaaacgtcgatattttacgtgggtttatgaatagtttcatcattgccggcggttcaactctattaacgctttatttcggcggcatgacggcttacgggttttcgaaatttaagtttcgttttaatacgatcttgtttttgcttatgctggcgacaatgatgattcccgcccagcttgcattaattggcagctatcgttggcttggtatgattggcttgcttgattcccatgcagctattattcttccagctgcggccaacacatttgccgtcttttttattaaacagtttttagacggcagcattcctgatgatgtgctggaatccgctcgaattgacggggcgggagagttgaagatttttcaccggattattttgccgatgatcgtccctgctcttgctgcaattggcatctttacctttataggagcttggaacaatttcattggcccactagtcttattattttccgaagagaaatacccattgcccgtcatggtggcattgatacaaggttactataatacagattacggcttaatgtacttaggcgtggccttgtccgttttaccaattattatcgtgttttcgctattttctaaacggattatgggcagtgtggcaattggcgctgtgaaagggtaaacggtctatttccttccttttcttaatcacttttggctgttttccatttgtttacgtgtaataaaatcatcgcagaaccaattgacgaaccgtttttattctggtgaaataaagacatgacaatagcaaaagcgtgttatgaaaggaaaagataggggaagagagtggttcaacaatggttcactatgacggtaagcaatttgtggcaaaggaaaacagtgaaaatggcgaagtttcttcagctacagtctttcaatacaaacaggaaggccggattttgactggaacgtatagcggaggcgagatccttacaggcactttaataggtttagttgatgatcaaggccatttgcgatttcgctataaccatgtaaacgtcgattatgaaatacgcggtggggaatgctactctataccagaacaattggcagatggacgaatccgtttgcatgaaaaatggaagtggaatgatgatagcagaagcgaagggacatcgatagtagaagaaattttacgttgatagatgttaaacatgaaaagaacgccttgggcaacagcccaaagcgtttcttgacactttaaatccaactccagccgcggcgccggcctccatagcctccgccgttattcccattctcgacaaccgattcgtattctgtccgctcttcgactgattcggtttgcggaaaactgtactcacggcgtacgacttggttattgacataagtcgtatgggtcggatacacttctgggataatgacgacttccgtttgttctacaacgcggtgctttgtagggtgaatgatcggatcacatcttttcacctttgtcggaagtgtttcgtagcaaggacgctcagtctttttacaatcgcatgagcatttcttatggtcgcagctcatttcttacctccatgaagaattatttaaagcgcaaagctttatacgataacgtatggaaaaagctgaatgctcgtactggttggctttcccatttacgggaaaatggctaaaacgtggatcagcgaataggaagcttgttaagaattgtaaagaaacgactatgtgtttcgaaaatttcgtaaagttcgctcttttttggccggtgtatgtttgccatttgctatactaatcgtaaagcagttcatttcttattaggagggacagtatgaaaagagtgactcaaaaaaggacgattcagtcggttatcatttttgctagttttacagtaggcgttccggcattggcagaaagcattagcgatcctccacctgtattggaaccaagtgacccgaatggaaaacgtgtattgtttgataacagccatgggcaaacagctggtcaatccgattgggtcatagacggagctttttcggactttgcggatgcactagtggaaaacgggtactatgtcaaggaacaccgtagtgcagaaccgctaactaacgccgatttagacgggtacgatgtgtttattattcctgaagcgcaaatcccatttaaggcgattgagcaagaggcgattgcctcgtttgcagaagaagggggcggcgtgttttttattgctgaccattacaatgccgaccgcaattttaaccggcttgattcaaatgaaattatgaacggatggcgccgaggggcttatgatgacataacaaaagggatgagcaacgaggaaaaagaagcatttgaaggggttgtaagttcagactggcttgctgaagaattcggcgttcggtttcgttacaatgccattgaccatacagtagccgattcgattgtcagccctgaagaggcgttcgggattacagaaaacattagcgcgctctccatccatgctggatcaacgcttgcgattattgatccaaacgttgctaaaggcgttgcttatttgccagatggcctgacgccggaagcgaataagtggaacaacgcagttgaccaaggtgtttatcatggcggcggaatggaggaaggtccttatgcggctatcggaaaaaagggattaggcaaagcagcctttattggtgattcgtcaccagtcgaggatgcgaccccaaaataccgcaacgaagaacatggcgggatgaagcggacgtatgatggatttattgatcaagacaatggtgctttcctcgtacaggtagtcgactggcttgctaaacaagaatcctataccaactttgctgaagcaggaattcctttagacgaaccgtctccacttctggaaatggaacagcctgaaaaaacaacagaaccacaggctgagccatggcgacagccgcaaggggattatcgatggtatgaccgttctacttttgcagccggatcgtttggcagtggacaggaagcaccgctagaagtggaatatgatttggaaacgccagaggcgctcccactaggagggcagacgttttctgtgaccgtagagctccgtcatttggcgccgaaccaaacggtcaacagccttgacatgcaagtatacttaccagggggacgttcgatctcgcaaattcaaggggaggatggcagttggcctagctcttacggctaccaccaaatcggtacgttgactgcagacgctacagggacagcaacgaaaacggtcacgatgcgtctggacccgtctgtagaggccgattcggcgatgattcgcttgcgcaatgaccgccaaaatgttgtgacgcaaacagttgctcttactgctgccagcgaaaaggtgacgaaactcccgacgattcaaaagagcttaaaacgaaaaagcgtaccagtggcactagcaggaagctaggggatttttcccctagcttttctcgtttacaaacaatggaacgactttgccgttattaacatcaattaacccgaaatcagtaattttcagggcagggctaactggcaaagataacgtcgacagtgacataatcggattgtaatgcttataacctaatgccgttagcgctttaacgaacgattcgacttttggcgcaagctcggttaggggcgcttcagaaagaataccgccaactggcaattcaagcatcgctttcacttccccgttctctactgccgcacagcctccttgtgcttggatgactgcgtttgctgcacaaaccatgtctctgacgtttgcgccgataacgagcaagttatggttgtcgtgagaatacgttgtggccactgctccacgctgtataatgtctccggcgatcaggccgtgggcacgcccgcccgttttaccgtagcgttcaaatgtggcaataagacgaaagtcgctgtcttgccattgaaggaggccgtttgcaacaggcaccttttcctgagtttcctttgtaaaggttgagccatctgcgacattcatcacccggcaaacatggatgccgtcttggcggtcggcaaccacgtgaaaatcctcatcctgtagaggagcaagcttgacgctttcgtaaaaatgtggtggaaactgccttggctttggcgtttgtttgtacgggcttgctgcatcaaaggcgagcattccatctttataaacagcggaaaaaacaaattggccgtcttctgcaagaagactgaagtcagcgatttttccaggagcaatcgcgccccggtcatcaagtttcatccgcttggcaggtgccattgtacaagcataaatgacgtcctcaaacttcattcctgctgcgagcgctttgtttgcaagaacatttaagtggccacgtttataaagggaatcagccatgacatcatcagtaacaaagcaaaaatgttctcgggtgtcgttttcaatcaaataggaaagcacgtcgtcggtcatcgatttttcttggatttctaaaaacatgccagctttaatgcgtgcttccattccttctcttgtttggtgtgtatggtcagacccaattccggcagcaacaatttgatgaaggtcgagccctgtcagcttaggcacatgcccttcgataggaagagcaggataggaacgccggaaatgcttgaggatttggtttgtttttgaatcaggctttgaaatgacatcgacatagttcatgatttctcctaagcattggatgtcctctgtgtccattaattcatccatttctgcgattccgatggcgccgccagtcgtttccaagctagtagcgggaacagaactagggatcgcatatttcatatcaaccgtacaggacgcgcttgcctcaatcatggctttaatgccttcgattccaaacacattggccatttcatgaggctctgcaacgatcgttgtcacgccatttcgcaatagtgcccacgaaaaagtttctggtgtgaccatcgagctctcgatatgcaaatggatatcgattaagccaggaatcatttgccggccttggccatcaatagttgccttggcttgaatcgattcaagttcgtcgctgtgaccgatcgccacaaatcggccttcgttaatcgcgacgtcactggcgataaattgctgtatataggcgttatagacgcgtacgtttttcactaaagtatctacatgcataataagtcctccaacttccgcaatggacaatggttgtatttcactttcgtatagggcctaacgcaggaagcattattgggtaataatgattttattgcttggaaaatggaggacgacaggcgtgccaatgtcaagaggcgtcgccatgtccgtatggacggtaaacgtgccggctgccgtttctacgatacattggtaacttcggccgagaaaggtgcagacaagcacttttccagctatgtggttggcagcgtccccttggtttaaatcgagaacaagctcaatgtcgtcagggcggattgctcctgtcatccctaagtcggaaccggcatgtttagcgactgaaaagcgttgtgctccggaggcaaatgcccaataagcccctttgtcttccctgtctgagaatggcaagaagtttttaaagccgataaattcagcgacaaagcgcgtttttggatagctgtaaatatgggatggggcatcaagctgttcaatgacccctttattcataatcgcgacattgtcggaaatggaaaagcattcctcctggtcatgagagacgtatacagctgtgatgccgagctcttgttgaatgcggcgaatctccacgcgcattgtttcacgcaagtttgcgtccaagttgcttaacggttcatcaaacaacaacaggtcaggttcaattactaatgcccgggcgatagcgacacgctgccgttgcccgccagacagttcttttggaaaacgattttcaaaccctgttaaattaacgacatcgaggacatgggcaatccgtttttttatttcgctttgcgtttgtttgcgcatttttaagccaaaggcaatgttgttatacacagacaaatggggaaaaagcgcatagttttggaaaacaaagccaaagttccgtttcgaaacggggacacgtgtgtaatctttgtcgttaaataaaaagcggccagatttcgattcgagaaaaccagcaatgaggcgcaatgtcgtcgtctttccacagccacttggtcctagtaaggaaaggagctcgcctttctcgatctttaaatcaaactgttttaaaatgtcttgtttttggtaagcgaccgtcacttggtctaatgttagtaaagccatgagagacctccattcttttacaaaagttgctatcaagcataggggaaacgggaatccgtttcgttatcgtttcgtaaaatacgacaagccgactaacctttcaattgcaaacatcaatatagctgtcaacgccattaacatcaccgaaatagccgcaaccgttgggtcaaaataatgttcaacgtacgtcagcatttggataggcagcgtcgaaagccctggtccggttagaaagacggaaatatcaacgttattgaatgactctaaaaacgcgatgagcactgcagcgataatgccagatttaatattaggcaaaatgactttgaaaaacgcgccgaggcggcttgctccgaggctcattgctgcttcttcaatcgagaagtcaaacgtggccatactagaagcaattacacggataataaagggcagcatcaaaatcgtatgccctacaaatagcgcgacttcaagtggaagctgataagcgacaatcaaatagcgtaaaaatgtaaaaccgagcacggtgccaggaatgagtatcggcgatacaaacaacacattcaacagcgtttttcctggaaactcgtagcggcttactgcataggcagctgggattccaagcaacaatgcacacagattgcctaacaagctaacaagcatcgaaagcttgaacgtgtccatgaacgcagacacagcaaaaatatttgcgtaccattcaacagaaaagccacttggcggaaactgcagcactgtactaggctcaaaagaagcgaccgaaataataacgagcggcccgagcaaaaacaaaaaaatgagaaaggaaacaaacccaaggccgatatgttttgattggttcatctgtttacccccttggatttaaaatcgctgcgattttttggaaaagaccagtcactacaaatgtgatgacaatcataatggttgcaatcatcgcagcagcatgccaatcatttaacgtaatcgcattttgatataaaaatgtcgaaataacccgttgttggccgcctagaagcgctggcgtcgtgtaggcggtaaaactgccaacaaatacgagcgtgctgccaattacaaggccaggtacacagagtggcaccatcacttttaagaatgcttttgcttttgaggcaccaaggctttcggcagctaaaaacaaatcagcatcaatgttctccattacgccaactaatgtaacgatcatgagtggcaaaaataaatggatgaggccgattgcgacagcggctggtgtatataaaattgataatggctcgtttatcagaccagtcgccataagaaactcgttaagcaaaccattgcggccgagaataatcatccagctaaaagaccgaacgactgggctgacgagtaatgggaaaatggcgagcatgagcatgattgcttttttgccgccttttaacttagaaatgtaataagcggcgggaaaagcaagaatgacgcagcaaaaagtcgttaatagagcgacgaaaagagttgtccataaaatttctaaaaagtaggcatcacctaaaaaacgaaaataaccgtctaaggaaaagctgccgttttcgacgaatgtcgagctgatcgtgagcacgagtggaataagcataaaaacagttaaaaacagcagccctggaatgagcaaaagcatgcgcattgaacggttcacgaacaaatcacctcacagaaaagaatggcccggcatcgagacgcctaaggccatgttcagttttgaattgaatgcaaaaagtacgataaaaatgcatcgctgtcgatctcagtggcaacgttaacgtttgccggttttcctaagcgctgttgcctgtcgcataccgtctgcccatcgcaaaattggctgtttgtttctacttccacaaacatctcttccaaatggagcaattcgggttttaaggcataagcaacggcaagaggatcgtggagggcacaagctgccacggtgttgcgcgcttcataccgttttatatagtctgcggtgcacgttttgataaactgcttgataggcgagtcaacgagcgatccaatgttttccctagtgagaagtgctttgcgggtaacatctaatccgacttgcacaaggggggcgaagccggcatggatcaccttgcgcgctgcttcaggatcgacatacatgttgtactcagccacaggggtgacattgccatgtgtaaaggcggcaccacccatatagacgacgcccgccacgagttttggcaaatcagggcatttttcaagcgctaacgccaagttcgtcagcggccctgtcatgacaagcgtgagttcgcctggataacggtttgcctgttcgattatataatcaggagcataaccgtcggcaggctgtgccgttggctcaaaatgaggcaaagcaccgccaaggccgtcattgccgtggacgctatgttcaaaaaagcacgggcgccgaagtggcgcatgagccccttggataacgggaatgtcgccctctttatgaagaagtgtcaacacttttaacgtgttaacagtcgctttttctaaagaaacatttccgttcactgtcgtaattgcaagcagttgtgcgtccgtgcttttggaggcaaggataatggcgagggcatcatctacgcctgtatcaacgtcaagtaagatttttctggccacttcaatgcctccttagttggcaatttctttattccagcggtcaatccattcggctgattcgctgtttacgtattccatgtcaagcaggtttagcgcctcaattgtttcttccccataagtgacgccttccgcttcctgttcagacaactcaacatcgatgttcacaggggagtcgactttcgctttagctgacgcttcctggacttctttgctcaaatgccaattgataaaagcttccgctaattctttgttgtcactgtctttaacgacattgactgtattcatgactgcgtagccaccttctgtcggggtaacgaactcagcttcagggacagcggcttgcaaatcatgaaaatacatttccataaatggcccagcagcaatctcgccttgggtaaacatgttgacgaagtcggatgatttatcatactctttaacaatatttcctttcaggtcggcaatggctgcaaatgctgcatcggcattaaattcttcctgtcctgctacgatggaagctgcatctaaaaacattggccctgttgtcgatgtaatagaaggaatcgttaaattgcctgcaagagagtcatcccataagtcgctccagctttcgattgggcctttcgtttgctcaggattgtaagcaatcccgaattggccaatcgtgtaggctggtccgtattcttcgccaagaggggctttcgctatatcataaaggttgtcaatattttcgatgttgctgcgatcgatttcagcaaataaaccttcctcgatgccttgctgggcgtaataatcagataaataaacgacatctacattagcagttccttggcgaattttgttaagacgttctgcgttgttgccgatatcgacaacaatattaacgttgtattcttcttcaaatggcttgtaaacttcttccttaaaaaaatcctctgcaaatccccaagtggaaatgacaaggtctgttggtttttcattgccgtcccctgaagcggagcatgcgctaacagcgaccaagcttgacgtgattacaaataagcaagaaagatgttttttcatttagaaagtcctcctagtacacatttttaataaagaaaaaaagaagacacacctgtagcagcatttgccatctacaggtgcatcttccttatgtaaacataagcaaaagcaaccgtattgaaaagaatcgcaaatcctcaaccagacatgtccagtctgcatttacgaagtggaaaaaagaatgtttgtaaaagcccattgcgtttttgcatcataatcacgcagcacaacctcgatcgggtcgtggaagtgcgtcgctaattgttctgcaagtttccgtttatagagaagggaaagatgaaaatcaacttccatttttaaagaaggcacttctccttcaagcgcagttgaacgggctgcccgtttatgcttcgcttgaattgttacaagtgccccggagatggaaacctttaataaagttgtgccaacgccgaacatttcttttgaaacatcattatatagatgagccaatatttttttattttcgtttgtatcgcctatcatcccatcacctttaaacgaaaaacaaatgatgtaaactattgtacataaattgctattgatatgcaataaaatgttcggatttaattgagtgtaattttcttgaagtcgaaaaaggatgtcaaaaacaagcaaacgacgaacattgataataaaaaacgagatactcttattttctatttagatttttatctaattagattataataaaattagaaaggagaatgtgaacatgaaaatcggccaactagagaaggaaaacatcatacgtcattttatagggaaggatggccgcttaaagaccataccggctaaattcaagaaaaagctcattcttttagaacatatgttaacaggattagaggagaatatcgtttatgaagaacgggagattaacgctcatattcagtcttttcatgatgactttgccacgatccgcagagcatgggtagagacggggtttatggaaagaaaagagggacgttatacacttgtgtcgccagcgaagcggccagctttttttaatgaaactaattagatggatgtctaattcgttcttttgatcttttttcatggcaacaggcagcgtaatcctaaatgagacgatgacgtggcagcagcaaacaaagtcgtgattttaggtcggtatgactagtagcatctgagccttttagagcgctcagatgcttttttatagtcgtatttaaaatacaaattcagtagttttgtcaaaattggtacaattgttttaatctatgatgaaggaagtgagttgtatggttggagaaaaagaggaaccgtttgtcgatctgtgccttgaatggctaggttgcattcgaacaggaaatcctgctcaaatgacgaatttgcaatcaagagcaaggaggcttttggccgctgaaaggaatgtcgatgacgcagtcatctctctttacttgctcaattcacacctccattctgaacagttaaaaggcaatgggaacacgtctgaattcattaagcttgctaacattacctattttttaagccatttcatcagtggaaggatcaaacagagcaaagcggattcgaatggagctttgcgaaattatttaaaggccgaacatgtgcttacctttattgaagacagctgtgaaaaagcaaaattttacgaagcggtagcggctgcttataaaaatcttcaggaggaaatcgcggcaaacgcctattcgaaaaaacataaggaagaggcggcaaagtgcatagtagtgacgtagcagcaaatgtggctgcttagagtttttctaagaatgttcataacatgaaggcggtaggcgttgccatagctgttataataaaagagaaggatgcttttaaagtctctaatcaggagggagttggaagcatgtataaacgaattcttgttggtgtcgatggatcgaaccagtctgaccacgccttttcgaaagcgctttccatcgccggagaatgtagggcaacacttatcattggccatgttttggacattcgcaattttcccaatgagcatatgctttatgcaggagagttgtgggatgagtggaaaggcaaggccgacgccatgcttgctcgttataaagaacaagcagaggcagcaggcatcaaaacggaaatcgcgtttgcctcagggaatccgcgcattcaagtcgcaaaaacattgacaaaggagcatggagcggatctactcattacgtcagcgacagggcggaaccgaatggaacggttttttaccggcagtgtcgctgaagcgtccattcgtcatgcgccatgtgactacttgatggtcaaagactatgaaacagcttctccgtactataagacgattcttgtcggcgtggatggctccgaccaagcggaagatgctttgtcggaagcggcatggttggccaaacaatatgaggcagcactgacgattgttcatgtcgagccgattggcatttatacagggggagcgatggctgccgctccgttatcctatgaagataaccatcgactagaagctgagcgcatgttgacatcatataaacaacaggcaaaggagtctggagtttcaactgtaaaaacggaatacgtgcatgggaatccccgtgccaaactttccactgatctaccggaatcgcttcaagcggatttgctcgtttgcggcgcaactggaacaaatacagtcacccgccttatgattggtagtgtggcagaggcagcgatgcgccatgcgccatgcgatgtgctaatggtgaagcgggacaacagccgttaggctgcaaggagccgtcttcaaagaggacggcttctattagtggagtgagagaaaggtacagccaaaggggacaagcatttgccttacagtattggactcgcctcagctatttagcgaaacgcggctactacgcgtacacttggaaataataaagagtgacataaaaaaagaggacgataaacacaaagcttggtaagcctagcgcgaataatatggataagagtggtgcatatgagcaaaccgttatttaacattccttataatacatttgaacgacttagtgacacagagcgttatttgttaacttacattcatgaccatctggatgaaattgcaacgatgtcgattgttacattaagcgaacgggcggcagtctctactgccactgttgtccggctgatgaaaaaaattggttttaaaggctatacgtcgtttaaatacaagcttgaacaggataagcaaatgatagacagagaaggaagtttgagcgatattggcaacgaaataaagcaagcgctgcaaaaaaacgaagaggaagtgcgccgtaccattcaactgcaaagcattggccaaattgaggacgcggtgcaaaaaatgcatgacgccaacaaaatttacatctttgcccgtggcttttcgcaaatgattgccaaagagatggccgttaagttgcaagttcttgacaagacgtgtgagatgcatgatgatccgaatattatccgcatcaaatcgcaaaaaatgcatcacgatacggacttggcgatttttgtttcattaaatggagagacgaaagaacttgtggaagcttgccaaaacttgagcatccgccaagtgacgaccattacgttaacgaccaaagtgaactcgacactgaataagttgtctgatatgacgttgatcggatacaaaagtgaacactcgttaatcccagattatgaagttcgctcacgcctttccttaaatgtgatcgcgagagtgctcctagacgcctatgtcatccgtacaaaagaatctgtaaagccgccccattgaactagagggcggtttttttcttatgaaatcaacgctgaaggcgcttttaccaaatattgtttttcaagatgcgaaaacattttcatgtacgccaatgggataataaagacatcaaggatcgcatttctgagacattaaacgaagttggtgagggcaaaatgatttatacatgcacgatgaacacagcaatcgacttatatgtacagttggaaaagcttatgcccgacaaagtcaaccgcacgatggatgaagactaccagccaaacggcaaaggcgtcaatgtgtcgattatgctaaaacgctatgggattgaaagcgtcgccacaggctttatagctggttttacaggggaatttattcaggactctttacagaagctaaacattaagactgactttgtgcacgtcgatggcattacacggattaacgtgtttatgaatgcagacaaggaatacaaaatcgtcaatcaagggccgtccattagtaaagaaaagcaacgcttgctaatagaaaaaattggccaattggaagcaggcagtacgttaattgtttcaggaagtttgcctgtaggcgtgtcagaagccattctcgccgagattggcgccatttgtaaaatgaatggcgtccattatgtccttgatacgagcatttcttctttagatggcgtgttggcctctcaaccttatttattgaagccgaatgaagaagagttagcaggtttctttcaagtgaaacatcgattgagtgagaaggagcttgtctactatgggtatgaactgatcaaacgtggagcgcaacaagtactcatttctcgcggaaaagacggcagcatttatttgaataaggacacttgcttgtttgcgacgtctcctaaaggcaaagtactgaacacggcttgtgctggcgatgctttgttggccacgttcattggccatatccagcaaggcacacctgtggaagacgcactagcgaaagcaacagcaacaggggcttctactgccttttctaaggggttaagcgatttaaaagatgttccaatgcttctcgatcaagtacaaattacacggaggggattcacatggcaaaagtaaagattgtcgctgcaacgggctgtcctacaggcattgctcatacttttatggcagcggaagcgctgaaaaaagcagcgaaacacatggatgtagagatcaaagttgaaacgcatggccaagcgggaatcgaaaatgcgttaacaaaagaagaaattgaagcggcagacggtgtcattgtcgctgccgacaaagatgtcaatacggaacgctttcatggcaagcggctcgtggatgtcccagtagcgaaggcattgcgaggcgccgaagaactaatccaacaaattatcgataaaagcgcgccggtctatcgagccaaaggcggagtgctgccagaagaagcgactggcgaagacaatcagccaactggcaaaaagaacattggtcgttcactgtataagtcactgatgaatggtgtttcccacatgctgccatttgtagtaggcggcggcgtgttgatcgcaatttcctttttgtttggcatttattctgctgatccgaaccatgaatcgtacaatgcctttgccgcatttctaaataaggttggcggcttgagttttagtgtgatggtacccattttagcggcatttattgccgaagcgatcggcaaacgttctggcatggttgccggttttatcggcggtttgctcgcgggtgaatcgggggctggttttcttggcggcatcattgctggttttgcggctggctatttaattgtgctgttgcaatacctattcaaaaaattacctcggtcattagacgggcttaaaacaatcttcctttttccggtacttggcatctttctaattggcgcggtcatgtatccattgatgtcgccagtcgccgctctaaacgaagcaatgatggcgtttttagcttccgttcaatcatcaagtccgctgctgctcggcttaattgtaggcgccatgtgcgcatttgacatgggcgggcctgttaacaaagccgcatacgtaacagggacattgttgctatctgaaggaaatttgtacttcatggctggcgtgtccgcagcgtgtatagcgccaccgcttatcaccgcatttgcggtcttgttcttcggaaagtacttcaataaagaagagcgaaactcaggaatggtgaactttattttaggatccacccatattacagaaggggcaattccgtttgctgccaaaaacccgattgtcgtcttgccgatattgatgattggttcagcgattgcagcaatcatgacgtatatgtttggcgtgcaagtgccagcaccccatggaggctttcttgtactgccggttgtgactggagcggtgaagtgggtgatagcaattttaacaggatcggttattggcggggtcttgttcgggctctaccgtaaaaaaatagcgaatggcaaaccaatcgaagggtaaaaggagagacagacatgattacagaaaagcaaattcaattgcactcaagcgcatcaacacaggaaggcgtttttcaggcgattgcagatttggctgtggaaaatggcattgctgtagacaacgctagtgttgttgctggattaaaagagcgggagtccttaagtacaacgggcttccaagatggttttgcgattccacatacacagtctgactcgatcacaagaccagcaattataatcgtccgcacggaaacaggaattgagtgggaatcatttgatgggaagccagcattcttttttatttcattgctcgtgccacatgaagaagcaggaacaacgcatttgcaggcgttagcggctctgtctcgggccttaatggatgatgagtcgcgccaagcgttccttactgcgcaatccagtgagcaacttgcacatttaattaaaaatgccatccaaggagatgagtaatttgggaattgtatcgactacaccaatgctaaaaagagcaaaagcaaataaacatggggtggtggcatttaacgtccactctttcgacagcattttttgggtgctggaagctgcggcagatttgagatcaccggttattttgcaaacaacggtcggcactgtaaaagcgcttggcgctaaaaacattgtggaagttgcccgagtcgcatctgagcattttcaagtgccaacaggcctacatttagaccattgtaccgattaccaagtgattaaagaagcaatccgggcaggctattcctcggtgatgattgatgcttctatgtacccgtttgaagagaatgtggcccgtacaaatgaagtcatggctcttgcccaatcgttagaggtaaatgtggaagcagaactcggcaaagtgggcggtgtggaagaggatattgtcgttgctgaagaggatgccaaaaaggcggtacccgaggaatgcaaacggtttgttgagttgacaggcgtaccaacgcttgcacctgcaatcggaaccgcccacggcatctacaaaggcaaaccaaatattgattttaaacggattgcccgtattgctgaactagttgacgtcccgcttgtgctccacggcggttccgctgtccctgatgaagatattcgccgctgtgtttcattaggaatggcgaaagtcaacgtatccaccgaattaaaaaatgcttactctgcggcgatccgtgaacatttcgcctcccatccaaatagccttgacccacgcgcctatttgcaaaaagcgaaagaggcagctatcgaaatggcaaaagccaaaatcagattggtaggaagcgaaaatactgttgtcccagcgtttgcttaaaagcgatgcctcccttcttacatagtaaggagggatttttttgcaaagaaagaaaatgaatccgtacgtgccaagcactaggcgcatacactggttttgaatgaaaggagtgaaggcaatgaagcctacaaatgaagacattcaacaccaatacggggtagaccaaaatgcccaaccgagccaaccactcgaggcggatacggtctacagaaatagtcacggggcggcaaatcagatgggaaatatggctcaacaaatgaactggcatcagcctgttcaacaattcgcgatgaaccaaaacatgcaacatactcttgaatatggcagtaacacacagccatttgcatcacaagaatatggcagtaacacacagccatttgcatcacaagaatatggcagtaacacacagccatttgcatcacaagaatatggcaataacacacagccatttgcatcacaggaatatggcaataacacacaaccatttgcacaggcagaagccaatcagttttcacagcagggggcgatgaaagagaagtgccgccaaatgaaagaccatcatgtcgaagtaaagatggcaaacggccaatcggttgacggaattttaacagaagtgagagaagacggcattaccgttttagtcggtgaggatgttcatcaagaagaatcccgccaatttggttggcggtatcgccgctatcgccgccgcttttttcctttcggtggatttacggggcttggcttttttccatatttctttccgccgtttttcttctattgatgcaattagtaaaagagagagtgtgtcgaagcttggcgacacactctttcttttggtagtaggcagtcgcgcttttagttgttgcgaatcaatctcttacgcctgcaccttctcgggaatgggcgagccggctggaagcagcggcagcgatcgcgccgacaatatcatcaaggaatgtatggcattttccgcctttatgtttgtttaacttaccgagaatgccaggtttgattttatcgacatagccaaaattcgtcagcccaattgagccataaatgttaacgatcgaaagggcaacaatttcatcaatgccataaaggccttcatctgattgcactatttcttgaagaggggagctgagcttgccttgttcggcgaggcggtcaagctcgattcctgttaataacgcattttgcacttctcgcttagccagcactttcattacatgaggccggcacatttccttcgtcaagtctggaacatacgtgctttgcaattcataaacaagatccataatttcttcaatcgtaacccctcgatcttccaatgcttccaacgctaattcaattgtgattttatgtatcatcgaaacaatcccctttcaaagctctacctataaagataccctatttttcattgaaatacacgtttagcttaaaagggaagggattccggattagggaacagaaagagggtgaaatgggctgcatctgtttggattgctgctttagttattgtgaaaagggaggaaaatagatgttaaaggatgatggggcttatagtaggagcattcgcaaaaaagaggagtcgttggatcaaagcagcaatccaagatgcagagatgaaacgggaaaagtccgaaaacaattggaaaagcgaaaaaagtgaagatgagagacagctagccggaattaaagataatttttctttaaggagaacacttcttgctctagtgagaccatttttgacataagaaaatcatgaacggtatctgcccgctttttgtcttctaaccgttcggcagtgctatgttcaagtagatagccgaccccattcaatcttttctccattcgttcaagcctgttctctgtgttctgttgaaaagcctcgaatgtttggttgaatttggtttgttggttgttaaacttgcgctgattctcgttgaaagcaagctgctccttttggaaatgacgcatttcattattgaaagcaagttgttccttttgaaaatgacgcatttcatcattgaaagcaagctgctccttttggaaatggcgcatttcatcattgaaagcaagctgctccttttggaaatggcgcatttcatcattgaaagcaagctgctcctttcgaaaatcgcgcatttcgccattaaaagcgagttgattttgcttaaaattatcaaattcatcaagcagcttttcttgttggttatctagctttgtcagtatcttgaggatttgttcagtcacttcattcgcctccattttgtgtattatagcgcatgttcctggcataaaccacctccttttaatggcatcataaataagcataatgtgctttacaaaaaacgataaggtgtttcatctacattaggttggtattactttaatgaggatagctagctgcgtcgttcgaagtagtctaacaatggaggcaccattgtagcgagtgtaggtgattgatgttcgtcgatggttttccttgtatagccaatattctacataaggttcatcattcctcctaaaaaagtcaattatttttataaaaaaagagcttatgaatcagaagctgttgattttcacgaaaaacccggaatgctgcataattttttaataacgatggaaactaacggcaaaacaggcaaggagggaatggaatggccaaaagagatgaccgctccaataatccagaaagaattgaaaatataatcggcaacacgctacaaaacatggatgaggctagagattatgccaaagctcattcagaggagctaagtgaggaagaaaaacaggagattgaacaaaaaaatgaacgccgtgagcaaagcatcgacggcttacgcgaagaattaaaagacgaagtcaatgaccaaaagaacaacagctaaacaatcgctaactggcatcgggagttcccggtgccagttttgtgttagtagcagtcaaacaattaaatcagagctgattgttaactatgaaaccaatctttttgctcccgcaatgcgctaataaatgtctctaacttccgcgaaacccatttatttttgtgataagcagcgtaaatgccaattggttctatcggagcctttgtcggcacttcatttaaagtgccttctgctaaggcatcccgaacagcgaattgaggcaaaaaagattggcctaatccgcattcgacacattttttgattgcctcgatgcttggaaattcgatctttttcatgccaaattgcgcttcctcagataaatactgctcaatgatcgggcgccaactgcaagcatattccgtaacgagcatggtttcagggatgttacggaacgcatggtcagctgtttcgacaagtattaatgtgtcactactaattttctcgaaagtaagagttttaggttgccactgatttgattcgacaagaatagctgcttcgatttctcctttttttagttgggcagtgagatgttggtaatcaatcagtttaagcgttaattcaattttaggataggttttagtaaagttcgtaataaaagttggaagccaatataacagcaatgattcacttacgccaatggtcaattctcctgctagatcaactgtgttaaggacggcttctttagacttggcataaagatcaataatttcaagggcatatggcaaaaaacgtttacctgcttgtgtcaacaccacttgtttgcctaaacggtcgaaaagcaagtacccaagttcattctctaattccttaatgtggttcgtaacagatgattgggcataaccaagggaatcggcggcttttttaaatccacctgtatctacaattgttttaaacgtgttcaagtgacgcagctccatgtagtagactcctatcaatattaatgatcgttttaattcgaaagttcaattttacagaatcacgactgtattataaacttttcagtacacattagcaaagaggagttggagagcatgaaagtaatggccttgtttggaagtgcccgtatagaagggaatacagaacaacttgccgatatcgcattaaggggaatcaatcaccggagaattcatttgctggaatgcggttttgatcctattattgatgaacgctatgcaccaaatggatttactgctgtgaacgatggctataaagaagttcttgatgactttcttaatcaagacattgttctgtttgtgacgcctttatattggttcggcatgtcaggacaaatgaaagggttttttgaccgttggagtcagtatatgcaagaccagagattgggcttccatgagcggataaggggaaagaaagcgtatgtaattgttgttggcgaaaatcctcatccgcgcatagctgctttgccattaatccaacagtttcatgctatttttgaatataccgggatggagtttagtgattatatcattggcaagggaaatcgaccaggtgctattaaacaagaccagttggctttggaaaaagctgatttttggaacaaaacctttcatcaaaattttgtacaatagtgaaacaggtctccgagggtccttctaaagtataagaatttgatgagattagctagactttgccataaaaacacccctacatgtagatgatgactctacatgtagggtggggatctatcgtggcttttgatcataaagtatgctggttgttttctatcagtcaataaagttcctgcgaagtactggaatacagaaaatcaaacaaaaatcgtacaaacagttaaacccctttgaaccacagaacattagataattcaaatagatttgctttgtagaccaaaaggaacaattcagtcatttcggtgcattcttggttggtcaatacgtaagtgataaagcaccgagtgatagccctgccgaagtgccaaataataggacgttgtcacctcggtcaatcttgtttgatgaaagaaggtcgtgaaaaagcattggaatcgaagcggcgatgcaattgccgtgggtagcaaggtggtcgccaatttgttcacgtttaaagccgaacttctcaaatattgtaatcccttttttggatgtttgatgtgggataatgaatttataatcttctttgctaagcgaatttaaaaagaaatcctccaaaaatgaaggaaggtatctgacagcagctttatagacttttctgccttccatctggaatagattatcatttggcatcgtttccggatcattagggggacgaagcgttccgccacctttaacacaagtaaaatctgcgccactgctatatgttttcaacaggaatttattaatttttgattcgccattagaggatgtaacgacaaacgctgctgcaccatcaccaaaaatggtacgcacttctttttcgcattggtccaatgttttactaggggtgtctgaactaatgatgaggatatgttgatagacattgttgttgattaagtttgaagcaacaaacaaagcaagtggaaagctgtagcatgtagtgtcgacgtcaaagcatggaataccggattcttctaagcctagttcacgttggtataaacttgcagcacatggaattgcttgtaaaggagagccgtttgcgccgataatacaatcaatgtcctctaacgcaaggccgctttcctctattgcctgtttcgcggcagctacccctaatgttaaggctgattcatttttgtcagggttaatgtaaaagcgggattgtacgcctgaagctttctccatccaccctttcggcaatgacatttccttttcaagttcatcatttttcattacggttgaaccgacagctttgccagaacctaaaattttggcgtttaacatcttctccactcctttttatcttgttttgttctgattaatagcagcgcttatttccttttatcgcccccttttaggactaaaaatgagatttttattgaatttatttttaatacggccagaaaacgagatgaaaacgtttctggccatgctaataatcatcatccagactacttgttagtagcgatcccctccaaaataatgtcgatcattttttcaggttcatccccgtgatcaggttgaagcccttcgccaagaacttggtggtaaaagatatagccgaagatgatataaaaaaataaattggcaataacagactcatccatgtccttaaactcaccttgttcttgtttttgcttaataaatgattttgtcgattccatcgcaggactagtgatgttcgttacaattgctttcttaatttcgtcctgtgaataagcttctcgaaagaggacttttataatcgattggttttgagcaagctgttccagcctgtcttgaaaagccattgtcaacgtttctttcgcattatttggctcaggtgcacggaaaatctcttgaatcgtttccacatatttttttgaaccaagttcaataaaaacaggtgctaaaatatggtacaacagatttgactttgacttgaagttacggaacaatgttacttcggcaacgccagcctgtttagcgatatcggcagttgaactagcctcataccctttttctgcgaatagcttggcagctgcttggataatttgttcttgttttgctgtttttttcttcgattcatttagcgaatctaagaaaagctgaaatgcttctgttaatgatggactattgtcgtcgttgttcattttgatcacctatttactggagatgctttttaaattttgcaattgttgcgatggaaagcagaacggtaaatccgagcaatacaaaactttgcggccatagaagctgtagggagtttgcttttaagaaaatgccccttaaaatctccaaaaaatacgttaaagggatcaagcctcctaatagttgaatcagcattggcatcgattctctcggaaaaacaaaaccggagagaataacgcttggaagaataacggcaaaggacatatacatggcttggagttggtttttggcgatggtggaaatgaaaatacccatcgctaaagtcgcaacaagaaatagcaaacttaataataccagtaagaaagggtcgccggcaatcgctacatcaaaccaaaacacgcctgctaaaagaacaaaagcaaaagacaatgtcccaatgatcgtataaggcactagtttgccaataattaactctgctggacggattggcgtaacgatcaactgttcaatcgtgccttgttccttttcgcggacaagagcaaatgcagtcaaaattaatgtaacttcttgcatgatgaggccaattaaagccggaatattaaactccatgctgtccatggaagggttataaaacacctgtgtttcatgctttaacgggctattggggacttctgtcccacttcggatcaattgttccgcctgaaccgtatgggcatagtttagcaaaagcgactcacttcgaaacaatgcctcttgcgcataagtcggatcggacccgtcaattaaaaattgtacattcgctgtatttgttgtaagttcttttgaataattcgctggaataataagacctgcatgaatgtcgcccttatccaggaggtgttccagcacactgacgttgtgttcataactcataatggtaaagtcgccttggcttgttaaacggttaattagttctctgctttctgccgtttgtgactggtctagaatagacaagtgaactgattcgacatcgtcattcatcgcatagccaagcaagacgagcagcagaacagggagaacaagagcaatggcaaggctggcaggatctttttttatttgaataaattccttgcgaacgattgcttgtagtcgtacgaaacgaaaacgcttttctcggttattcaaatgaatcacccttttttagatgggaagcatgttcttgctcttgttgttctactagcttaacaaacaaatcatctaagtttttgacactgtattcgtccataatctcttttggcccgccgttaacaagcaagtttccggcatacataaacccgatgttgtcacaagttaaggcttcgtccatgtaatgggtcgtgacgaggacggtgacgtcatcttttttcaattgatggatgatctcccaaaatattttgcgcgagacagggtctacgcctgcagttggctcatcaagtatgagcaactccggttcatgaagcatggcacagcataatgcaagccgctgtttccagccacctgacaacgctccggcccgttgggaaatgcggtcctctaactttgttaatcgcaaaagcgtttggatacgcgcagcgagctctttcttctttagtccataaatcgctccataaaactgcaaattttcaagtaccgttaactccaagtacaagctgaatttttgcgacatatagccgattcgctgcttaatttgctctggctgttctgcaaggctataaccaagcacagttccgctcccagatgagggcgggagaacgccacacaacatgcgaatgacagtcgattttccggctccattggaaccaagaaagccgtaaatcgtgttttttttcacggaaaggtcaaggggcttgacagccatcttagaaccgaacttttttgacaacgcgttacaacgaatagcatcctctgtcatgtgttcaaatcgctcctgaccgccttataatgaatcaatccaaatctcgacatccatcccggctcttaattgctcgtcgttgctttcaattgtaatgtgcacagggaaaacttgactggctttgtcttcgtttgtctcgatcgtttgcgaactgtatatcgcttccttttcaataaagctgacagttccttcgaatgtttctccaggcaaagcgacagcgcttatttgaacggccatcccctcagaaaactcggaaagttggctttgcggcacataaatcgtcgtttccaaaggagcgtctgtcaaaatcgttacaagtggtgtaccagtttgaacaaaatcgccctcatcgattagccattccaaaatggcgccgtcttttggtgaatgaatgcttgcttttgattggtggtattgggcctgctctagacgggcttgtgcttgatcgcgttggctgttaagagcgtctaattgcacattagaagcggcctcattttctgcctgctcaatttcagcgtcggctaatcgtaccgatgcttccgcttctgccgtttgtagctccaataaacgctcgtctaaagacacgagcagctcatcttttgcaacggcttccctttcagcaacatgaatgttttggatttccccttgtaaagggctgtaaatcgtttgttttttcgcttcaatcgaaccagtgtaagctgcttcttcggtttgcgaacagccaactagcaaacacaaagataaggagaagattgctggttttgcaaaagacataacagcacctcgttattgaatgtaagtacttactttcaaatataatcgaagaaaaagagaaaatcaatggggaatgaaaaaatttttcaaagagcatgccagtgacagaatagtcattgtcgccctcatttggtaaaaagtgcggttatttcttacttttcttaaggctttactaggtgcgcaatttggcagatccaaacagatgtgcataaaggaggtggaaaacaaaaacgcatttcaaacgtttgctttggaagggcggtattattttgctatgtggtcacttgcctttgtcccagaaccacataaagggatgacgatcgtttctgtttcacagtgtcggtaaacgtgaagggcggcgtaggtagcggcgctagtaggttccacatcaaaaccttgcttggcaagtgccgagcgtgctttcgctatttgtgcttcgctaacagttatgaaggtgccgcccgtattgcggactgcctctaatatttgcgttgcacgaggtggtgcagcgatcgcaatcccttcagcaatcgtcgtttggcctactataggcgtaatagatggttctcctgtggcaaacgcatgagcaagaggggcgcattgttgagcttgcacggccacgattttcgggcatttgccaatgagacggttcgctaaaagctcagaaaagccgtaataagcaccgagtaaaagggtgccattgccaacagggataatcactgtgtctggtgcgtcgccaagctgttcataaatttcgtacgcatacgttttcgtgccttcataaaagtagggattatacacatggcttgcataaaaaccgccttcttctaagttggcggctttttgctgtgcggcacgtgcgacatcttcacgtgtaccggcaatggtgtggaccttggcattgtatgctgccatttgtgcttgttttttcggggaaaccgtattgctgcaaaacacttcgcaagcaatgccagctcttgctgcataggccgaaacggcagtccctgcattgccgctgctatcggcaatgacagatgtggcaccaagttctagcgcttttgcgattaggacagcagcgccacggtctttaaaagagagcgtcggcattaaatagtcgacttttacatagacattcggcttatcagcagaaacaggtagaagcggcgtattgccttcgcctaaagtcacgttttgccaacttttcgcgtctttttcaaacggcaatgcgtccaaaaagcgccatagtgtaggaggaccagattcccaagccgtaggttcgagcaatggcatttgtttgtcaaggtcgagcagaccgccacaaaggcacttccaaagatcacgcgaaacagggtaagtggtatggcaactgcggcaaacgtacgattgcttcatcaatagatcgctccttttgtaacattcatagaaaatgccagtttgagagaaatgttaacttttttattgggaaaatcaaaaaactactagttttataaacaatgttaatagatactagatttgaatccattatacccattatgaggaggcgtgatcaatgaaacgaagtcacttatttactagtattacattagcatccgttgttacgttggcaactgctccggcagcttctgctgctagtttcctgtcaccgttacaagctttgaaagcatcatggtcgtatgagggggagacgggacctgaattttggggagacttagacgaagcgtttgctgcgtgttcgaatggaaaagagcaatcaccaatcaatttgttttatgatcgtgagcaaacatcaaagtggaattgggccttttcatatagcgaagctgctttttctgttgaaaataatgtgcatacgattcaagctaatgtggaaaatgaggatgccggtggtttagaaattaatggcgaagcttatcagctgatacaattccatttccatactccgagtgaacatacgattgaagaaacatcctttccgatggagcttcatctagttcatgcaaatcatgcaggggatttagcggtgctcggcgttttgatggaaatgggcaatgatcatgaaggcattgaagccgtttgggaagtcatgcccgaagaagaagggactgctgcgtattccatttctctagacccgaacctattcctgccggaaagtgtgactgcttaccaatacgacggttcattgacaacccctccttgtagcgaaggcgtaaaatggacagtgcttaacgacaccatttcgatttcagaaacgcaacttgatgcatttagggacatctatccacaaaactaccgtcctgtccaagagctaggcgacagagaaatcggttttcattatcattaatgagaaagcgcccactacctagtgggcgcttcagcttaaccaaacgctcgcaccgcctgtgttttctttcagtctgagtggcaaacgcttgttggcgtcttcggttgctatgatcttctatttactcgcatcttcattcctcgtcttacatgcgttgattattccgacgcattcactctaatgaaacaggagacggtaccttttacgtggccggccacgaagtttttcctgccttactgttgtttcctctgcggcttgtccttgttctaatttctttaaaattcgattggcgcttcgcgtcgtgatgcctaaatgaagcgcaagatcatttgcacagacatcatggcgctttgtttttgcaggtattgccaaaattttttgcagttgcaacacagatacgccagtttgtttgctccatttttgcaattgaagcggatccagttgtagttcaagtcgtttcccatcgccaagagggccgagcaacgtgctttcagtcaagatataagggcagccgattctcttttgttgcttgttggctgtttttgcgtttgtccgtgcttcatggagtgtttttcctgcgccccagcctaattgaaacataattttggggtgtttgccttttaaataggcagataaagcacattgttggaagctgttggtgaggcgctctaaatcgccaaacgacgttactaactcaaagcttgtttcattcgcatgaactaaaagtggctctccttccatttctgagtaagaaagcaatgcatggtggagcttgattttttctatttctgtttttgccttaaaagtcaaatagccaatcgcgatttgtttgtctgctaattcttgtgtttctaactgtagcagcaatgtttctacttgtttatggatggaactagttgatggcgctaaaaaaagtgtcgggatgccgtccttttgcaagaccggcaaaatattgctgaacctcgtaattgataattgcgcgccatccatatgtgcgtgtcgatgaaaggcaatcagtttctcgtacatttggtcgttgacgtcttgaaaaagcgaatcgctatagtaaagggggaaatcgtctgaaggcacaaacgactttaagttcatatagtcattctctttgttgagaaaatcaatgaccgttcgcttcatttcaaaggatcgttcaaatgtgcaagtgagcaacgttttataaaagtctttttcgcttaaatcgacaaacacagatggcttaggcaaagggccaatattttgttcaaaatagagttttggaataatgccgccaaaaacccagccatcaatgtcatgacggtactgctgataaatcgttttaatttcgcttaagtttttatatgaaaaataaataaagctagcatttgtttgcaaactcattaatgctttctttatatggggagtggtatggaaggcggccataatgccgatcgttgccattggtcatcctccaaatgtcttattttttttagtttaccagacttttttaaaaaaagtattggcgattaaggcgattttataataaagtaaggaaaatacatatgtctgaaaactgtcttttaatttataggagggggattatggatcaacggctttttttaaagcgctatattgacgaacatcaaaacttatttcagcgggtagcgttggccatttggaattacgctgagttacggtttgaagagtgggaatcttcaaaactcattagtggcatccttgaggaagaaggttttgcagttgaacgggggattggcgaaatgaagacagccttcgttgcaacgtatggaacaggaaaacctgtcctttcatttttaggcgaatttgatgcgttgtctgaactgagtcaagcaggcggtacagccgagcaacaatcgattgttgctggaggggcagggcatggctgcggccaccatttgctcgggacggcgtcattggcggcagcactcgcgacgaaagcctacatggagcagcacggagtcgttggcacgatccgttattatggctgcccaggggaagaagggggctccggcaaaacgtttatggcaaaagaaggcgcatttgctggtacggacactgccattagttggcatcctggcacttatacgagcgtatggacggccgaaacattggcgaatatccaagcttcgtttgcttttataggaagagcttcccatgctgctgccgctccccatttagggaggagtggacttgatgcagtcgagttaatgaatatcgggagcaattatttgcgggaacatctcattgatgaggcaagggtacattatgccattacaaacgcaggcggcctttcgccaaacgtcgtccagccaaaagcagaagtcctgtatttaatgcgggctccaacgcttgagcaaacaaaagctatttatgaacgtgtcaaaaatatagcaaagggcgcagcactgatgacagacacaacgttagagattcgttttgaaaaagcgtgctctaattttgtgcgcaactacgtgcttgaggatgtaatgaatgaggaattgattgcagttggccccctttcttacacggaagaagagcatcgtttcgctgaaacgattcgccagacattttcggaagaagaccgggaacaaacgatggtggagttggcaaatctcgtcgagaatccgggccaagaatggcttggacaattgcgtcacaaagcattaattgatgaaatggtacctgtctcaaaaaagcgaacgctcctggctggctcgactgatgttggtgatgtaagctggattgcgccaactgttcaatgctatgtgacatgctttgcatcagggacagcattccatacatggcaaatggtttcccaaggggcaacaacgactgcctataagggaatgagccacgcggccctcataatggctgcgacagccgtgcgcttattgcatgatccagacttggtgcgtcaagcgaaagaggaatgggaggaacggtttgccaacctgcaatacgtttcccctattccaaatggcgtaaagccagctcctatgcagcgctaattgttcgtgacaggttatctgccagaaaaggcatttgcacgttcgaaacgtgatagactgttagcgaattaaagacatatttgagacactggaggaacagcgatgacagaacaaactgaaaaacgttcatttttttcaaaagtactggatggaattgaacgtatcggaaacaaactcccccatccgttcatgttgtttatttacttggctgtgtttttaatggtcgtttcagccgttttacatgcgttcgacttaacggtggtagatccaggcaccaacgaaacagtagctgtaaggagtttgctatctcaagaagggtttctctacattctctcgtcgatgcttagcaattttacaggattcgccccttttggacttgttattacgatgatgcttggtatcggcttggcccaaaaagcggggctatttgaaacattcatgaagacaacgattttaaaagcgccaaaatcacttgttacatacgcggttgtttttgcagggatacttggcaacattgcttctgacgcggcgatgattattataccgccggttgcggccatggttttccacgctataggacggcatccccttgctgggttagccgctgggtttgcaagtgttggagcaggctttacagccaattttatgattgccggaacagatgcattattagcaggcatttcaacggaagcagctcggacaattgaccctgatttcgttgtaacccctatcgacaactggttttttatgtcggcttcggttgtcatgctcgttttcctcggtgtatggatcacagaaaaaattattgaaaaacggcttggcgcttatgatccagcctatgcagacgaaggcatcaacgaccaaagcctcgattatccaacaaagcaagaaataaaagcattgcgcaatgctgggattgcccttctgctttatattggcgctgtagctatgcttgttgttccaacaaatggaattttgcgaggcgaagaagggaccattatcccgtcgccctttatcgacaatatcattccgattttgcttgtcatgtttgtcgttgtagcggttgcctatgggatcacagcagggacaataaagtccacagcagacgtgccgatcttaatgggagacgcgatgaaagacatggccggttatatagtgcttgtgtttgccgccgcccagtttattgcttactttaattggacgaatattgcgacgttgattgctgtaggcattgctgattttttacagcaagtcgaatttacagggctaggattgttcgttgtctttattttgctcgtaaccgtgctaaacttgtttataacgagtggttccgcgcaatgggcgctcatggcccctgtgtttgtgccgctgttcatgttgcttgactacaatccagcatttactcaacttgcataccggatcggggattcggcgaccaatgtcattacgccgatgaatccatatgtcgtgatggtgcttggttttatgaaacgttatgacagcagggccggttttggcacgttaatgtcgacgatgctcccatacagtttgatcttccttggcgcttggattgtcctctttatcatttggaacgtagttggtttgccgatcggtccaggcagtggcatgttgttaacgaagtaaccaaaaggaatgaatggacggtgtatagaatggaaaaattacagaatcaactaaaaacatggcgccgtgatttgcataagcgtcctgaattaggctggtgtgagtaccaaacaacggcttacatttatcatgttttaaagcctttatgcttcacccttcatcttggcaatgaagtaagtagcaaagagaaaatgggtgtcccttcctctgaagtggatcgcctccatttcaagcgggcagaggaggcaggcatagatgcaaagttgctcgagaaaatggctggcaatcaaaccgggcttgtggcgacttttgacacaggcaaagcaggtaaacatatggcttatcgctttgacattgacgcgctgcccatttttgagtcaaacgatgcctcccatttgccggcaaaagaaggatttcgctctatctatgatgggcatatgcatgcctgcggccacgatggccatacagctattgggcttgggctggctcagctcatccatgaacatcgaaacgagttaaatggcgtatttacactgattttccaaccagcagaagaaggagtaagaggggcgaaagcgattgttgaaaaaggctggcttgatcatgctgactatttcctcgctggccatattatgggtcaaccccttggcacggtcgtacctggcgtagcttctgcattggcgacaacgaagctaaatgttacgtttaccggaaaatcagcccatgcaggaggcaacccagaagaaggcaggaatgcattgttagccgcagcacaggctactgttcaacttcacagcatccctccacactcacaaggggcaacacgtttaaatgttggcacgtttcacgctggcagtggtagaaatattattgctgaccgggcagagcttgaactggaaacaaggggcgagacgacggaactgaatgcgtatatggctgaaaacgccaaacgaatcatccgccatacagcagaggcatggggtgttgattatgcgctcgatcgagtcggagaagggatttcggccaaatctgatccccagtggctagaaatggtgaagcgagcgcttgcggcaagcaatctagttgaagaagttagtgaccgctatgaagcaattggaggttccgaagatgcgacattcatgatggaacgtgtccaacaacatggcgggcttgctacttacttgctttacggcagcactctagcggaaaagcaccaccacccattttttgattacgatgaacgggtgttggaaattgcagttgatagtttatggcgtttaaccttgcacttacaataacccatatggataattatggggaataaaacgtgctcataagcatactaaatgaggcaagtgtctgaatgaggtatctatgtttaaagcggagcctgcttggctccgcttcagactgtagacaaacgctcgcatacttcgtcgtttgcctcggtcatatgctcatgaacccccgttctattcgcatcttccctcggctgcactcctcgtctgacaagcgttttctatcagtctgagggcggttatcgactttgtcgacaacctcaagcggagcctgcttggctccgcttttcgttattctactccaaaaaacgcctccgcctttttcaagaaaggctcgtcctctttgctcatttcatattcctccacgatcgcatccacaggacagacgccttggcaggcgccgcagtcgatgcaaatatcgggattgataaagtactggtcatcgccttcttcgatgcaatcaaccgggcaaacctcagcacattctcctgccttttcgccaatgcaaggacttaaaatgacaaatgacattcttgtcacacctccaatctaaagtttgtacaaggcaagttctaattcaatgcggtcttttatttttgaaaggcattcttctgcagtttgcccaaaaatctttttgccgttcacaatcgcgtaaggacgcaaggcgcacatgccgcaaaaagagaggcagctgtttgtaatgacagctacttctgggtattcactttctaacagcccctccacatctacagtatggatgaggtttgaatcgcatatttctaccacaataattcccatcgttttccctcctttcgcggcctgtgcttgccaagcaaaaaagaaaggcggaaagcttgaactgctttcctcccttcttatctttaaccgatcgccttttcgtatgcttccgatacggcctcccaattaataatggagaaaaagttcgcaatgtactctggccgcttgttttggtagttcaaatagtaggcatgctcccaaacatcaagaccgaggatggcttgttttccgtccataatcggattgtcttggttggctgtactgtaaacttctaactctttgctttcattgacgacaagccaagcccagcctgagccaaaacgtgtcgttgctgctttagtaaatgtttctttaaagccttcaaaactgccgaatgcttgatcgatggcttcttttaaagcagcgctcatttcatttgcgccttttggcggggcaattacttgccagaacaatgaatggttaaggtggccgccgccattattgcggactggggtttgaatcgatgccggaagtgactcgatgttggcgagcaattgttcaagcgattggctttgcaacgatggctcgttttccaatgccgcattcaaattggtaacgtatgtttgatgatgcttgccgtgatggatttccattgtttttctgtcaatcgttggctctagcgcgtcaaaagcgaagcctagttctggtaatgaatgggtagccatagaatcccctccaacttgtttatgtactttgtatactttatagtataaaaagaatgtctttataataccgtgaaatccttttaaaaatcaagggggaacgcattgcttcttttctgtttttatacgatatagtaaactaatgtgtaagagcagcaggaggagtgtaaacatggaaaaacaaacaacgaaagagaaaatcctcgagttgctgaaaaagcaagtagagatgagtgtcggcgaattaacggatgcgctcgggatcacccatatggctgtgcgcaagcacttgaatgttcttttaaaagacggctttatccagtttcgtgaaataaaacaagaaatagggcggccgctgcaaatgttttcaatttcagaaaaaggagaccgccttttcccaaaaaattatgaagggttgacagtcgactttttgcacgacattcgagaccttcatggcgacgaatccatccattatttgtttaaaaaacgggaactgcgtttaacggatcgttattttaagcggatggtccataaatcgcctgaagaaaaaatggccgagctagcgaatatccaaaacgaaaaaggatacatggccgaagtcactcagcatgatgcccggacatttgagcttgtcgagcataactgccctgtatttgcagtcgccaaacaatttaaagctgcctgccaatgcgaaacatccttgtttaaaaatgtacttgaaacggaatcagtcaaacgagtggcatgtcaatcagacggcgacactgaatgtcggttcgtgatggccttttcagaaaaacggcaagtggagcatcgttgagcgctgatatgcgtataaagcgatagcaagttaaaattgtgtaaaagatgttaaacgttcgcgccttttgtaaagaagggcgcttttttctttttggcatgactttgctacaatcatgctgtccatactagatgatagaaggaaatggacgggaaggaaaaaggttgtggtaaaacgtgcttgctagacatgcatttgcttatctcctctcacacggggtaccagcattggtcgggtttctcggcattgccgtatattcacggatgctctcaccagaacagtacgggcgctacgctcttgtgcttgcagtgagtgcactcgtcaatgccattgtgtttgaatggctgaaagtcagtgtgcttaggcattacaaaagcagcaaccaaagcgaagctttttatatgacggtaaaagttgcttttatagggctaatggccggaacgctagcgatcgcagccataacgttgctcgtttccgagtggctgtcgccgccacttgtgcttttagcactgttgctgtgttgggcccaggcatggtaccagttgaatttatcgcttttgcgggcagaactttcccctgtgaggtatggaagggttgcgtttgcccgctcactgctcgggctaattttagggatcttgtttattgcggctgggtacggggaaataggcttggtcattggaattgtggtcggtttggtgctgccgctcctccctttattttggcaacggtggggatggcgtttccatcaaaaagcaatggactacacgcttttacggcaatttgcggcgtacggattgccgcttacgctgacgttgttgcttgggatggtgattcatcaatcggaccggattattattagtgaaatgattgggatagaagcaacgggtatgtatgcagtgacatacgatttaacggaacaaacgatctttaccctgatgttaattatcaatcttgctgcttttccacttgctgttaaggcgcttgaggaaaagggggaagaagcagcgcgggagcaagtaaaagccaatactagtctattgcttgctataggtattccggcgctttgcggtttagtcgtgcttcgtgaaggggttgccgagctatttttaggagaagcgtttcgggagacggcagtgctgctcatgccttacattgccgtgggcgccttgttaaaaggctttaaactctatggcgtcgatattatgtttcacttgtataagcaaacaaagctgcaaatggtgccagtcgcagtagctgccatcgccaatgtgatactaacgattgcccttcttcctacttatggcttagaaggggccgctttcgcgacggtggttgcttatgggttggcgattgctcttgcgtggctgtttataaataagcaaatggggaggctgccatttccgggtaaagattttgtaaaggttttgtgtgcaacagcgatcatgctcctttgcatgtggccgtttttaggcagcgctcactggggcatgcttatccttcaagtggggatcggagggctaagctatggtgttgcctgtttgctgctttttcggaaacaagtacagcgcatgtacaaaaaggtaaatcgaaaacaaaatcaaccagtcattgaaaaaaggggagacggacaatgattacatttgtcgtgccaacgcttggtgaacgatgcaacgaatttgaacgattgcttgccagtttggataagcaaacggataaacggtttgagttaattgtcgtgtctcaaggcaattacgaccaagtagagcaatggctgagcgctttccagttgcgctcgacccatattaaactaggggagaaaggcttatctagagcgagaaatgcagcttggccagcgctgaaaggcgacatagtctctttttccgatgacgattgctggtacccccctaatgcagtcgaacgggtacacagcgcatttgcgcaagaaggcgctgatgcttactgctttcaaatttatgacccgatccaacaaagcccgtataaacactatgacacatcgcctggcattgtccgaggacgacgcgtttggaaaaagtcctccattgagctgtttttccgccagacagcaattgaatcgctgcgctttaatgaagcattcgggcttggcggaacgtatccaagcggagaagaaaacttgtttttgcggcaatttttagtggcaggccatacactgatgtacatacctgaaacaattgtattccatgagaaaccgtctcaagcgtcgcggctccaggaggcgcaattggtcagcaaaggcccattatttaaaacaatgtacaacgggccgtttggctttgtcttgcttaccgcattgtttgctaaaaaatataggcatttaaagcacccagctgcgagctatgcgaaagcggtacgggcattgctggactataagccgaaggaggcaaggccgtgaaaatcgcgtttgtgctctattcgtttgcagcgggtggggttgagcggatgacgcttcatttagcagaggcgtttttacaaaaaggcaagcaagtcgatttgcttgttatccatcctgaaggcgaatacaaacaagccgttccaaaaggcgtcaatcttttcgcgtttggcaaaagtacggcaaaggaagcgttgccagggatgatttcttatttgcgccgggagcagccagacgtggtttgttccgcaaaagactacttaaatgtccttgtaattgctgctaagaagctgagcttttcgaaagcacagttaatcgtctcatgccgcgtccatttgagcgagcaagcacggaaacagcctggccagtttcgccgcattaaaacagcagttcgttacagttatcgctttgccgatgacgtcgttggcgtctccaaaggcgtagctgaagacatcaagacaattgcccaattgcctgatgaaaaggttcatgtcatctataacccagttgtgacgaaaacgttagaggaaaagatggaacagcctgttaaccactgtttttttgaagaaaggaatgccaaagtcattgtcacagttggccgcttgcatgtgcaaaaagactatcctaccctattgcgggcatttgcgaatctacaacaaaacgagttgcccgaagcaaggctgctatttataggcgatggggaagaaaacgaaccgttgaaaaaactcgcttttgagttaggcgtcagttctgttgttgattttgctggtttccaaccgaacccttacgcctatatgaaaaaagcgcatgtgtttgccctttcttccgcttgggaagggtttggaaatgtgattgtggaagcacttgcgactgggactcctgtcgttgcgacagactgtccaagtgggccaagggaaattttagcggacgggaaatatggtcaattggttccagtgggcgacacagtggcgttggcacaggcaatgaaagacgctttgcttagccatcatgacgaagcggaattaataagccgtgctcgtgaatttacagtagaagcttgtgctgccgcctatgaaacattatttcgttaggtggggaaagtctcttttttgcggctatccttctagccataggcgaacattcccatttacaaataaaaagataagaggggcttcctttatgggggcccctcttatcttttatggaaacgtgagtgcggcgattttaaagacgccactatcttctgtttctgtccaatcagcaacgtaaagcaactcgccttccgtatcgtaacggtaaatccggttttcggccagcatgtagcgtgtgtgttcatgttcagacagcagcgtctgcagttttgtataagcgtcttcctcgatggcggcttgttgggcgagcaacgattggaattgctgctcggatagttcagacgcattgttgcgcaaatagctgtctccttcaagggcgctgcggatgacgagcgttttctccccgcatcctcctaggaatagcagcaacataactgcaaaagtcagctttttcatgatgacattcagctccttgctccattgtgccctaagtatagcgcgcttagacgcagaagtgtagatggcagaaaacggattgtaaaggcgaaaaaaggacatgctaacaagagttatcctccgtcagaagtgggtttaccgattttaaggctggcaaattttttacaaagggcgagaaactttaaccaattctttacaccgcctttataaatgctctttgtttgcgtgatacgatggcgacagttcacgttgaaaggatcttcatgtatgcaatcttaccgaattccgtatgtcatttctgcgcatgtgcctgcttttgctttcgcagtggcaggtgtttatgcagcactggctccagtagccgtctcccacgtgttccaacatgttttgtttgtgcccagctcagtgctattgactgggttagcgatttttctattgggactagcctggttttcgcgtagtgaaggagtctatgtaagacaattacagccaatcgcgattagtatgcttgccgctgtcgttattccagcacttttagcgacgattgctgccggctatgctttaacggttttccaatcaaccgagtataccgcctacatacagcaggcgttgccgcgcaggctgatgaacctcggtttatttgcttctttaaccattctgatcttgctgtttttaaaacaggcgcctttgcggatgacccgttctctgcttattggctatttgacaggcgcaagcctccttgtcataggagggatctggcagtttctccatttttcgattggatatccgatgccggggttcgaaacgcgggcgtttgtgcatagtgttagtcaagatgtgctcataaattttcgactaacttcctttactgatgagccaagttttctcgttccatttttaattgatggcctaattatcggcgtgctgcttttcacgagaaaaagctacgcgttgtatagcatttcggccgtgctggtcttgttgctttctttttccgtcagtggttatgccaacttggcgcttgttggggcggccgccgttgtgttgctgttttcccggggatggatatcgaaacgagtcggcctctacgccgccttagcgttgctcctattcgctgttttagcaacgcttgcttttccgcaagtcgtaatcggtttatttatgccgattatcggccgtttagacagcctgtttgatgtgatgcatcatagccgtttgtatatgctcgtgttcccatttgtgtggctgtttgattattctttcgtcaacgctttgtttggatacgggccaggaggatatgactttttggcacgaacaaaatttttaagccaccaaggcgctgttagcggcacatcaaacaatgtgtttgtcgatttgctattcgaacatgggatgattggcggcatgacttttgctatcgtctttctagctgtgtttgtctatttgtggaaaaagcgaaatggccatttttactattcggttgccttggtgttgtggctccatttaggagtgacctccttgtaccgctctgattttgtctcaccgcgattttggattctagttgcgattactgctggtttagccgagatggcgaggagaggcttgttttttcaagcacatcaggatcaccatacatcagaaaagaaggtggaaacgttatgaagctttgtgtgatcggaacgggatatgtcggacttgtgtcgggagtgtgctatagccacattggccatgaagttgtttgtgtcgaccgagatcaggaaaagatcaagcgtcttagccaaggagaagtaccgatttttgaaccgggactcgaagatatgctagcaagcaacatggcggcaggacggctatcgtttacgacccgtttgtctgaagggctggccggggcagatgcggcgattatagccgttggtacgccagctcgggcagatggatcggcaaatttggattatgtggaagcagtcgccaaggagattggctcatgtataaaaacggggcttgtcgtcattacgaaaagcaccgttccagtcggaacaaatcgcaaagtgaagaactggattgctgaaacttgcggacacgaagatttcgaagttgcctcctgcccagagtttttgcgagaaggcactgccatagccgacacgcttgaaatggagagagcggtcattggcgtagaaagcgtcaacgcggaacggctcctccgcgacttgcacaaaccgtttcagacaaccattgtcacgtgcaatctcgaaacggcagaaatggctaagtacgcagccaatgcgtttttagcaacaaagattagctttattaatgaagtcgccaacgtctgtgaacaagttggcgccgatgtcacttctcttgccgaagccatcggtttggatcaccggattggacgccactttttaaaagctggcatcggttacgggggttcttgtttcccgaaagacacgcaagcgtttatccgcgtcgcccaacaagcaggctacgacctgcaaattgtgcctgcagtagaacgagtcaatgctgcccagcgcctaacggttgtccataaactgaaaacagcactcggtcataatttggcaggcaaacagattgcgatgctaggtctcgcgtttaagccaaatacagacgacatgcgggctgctcccgcccttgatgtgtatccagcgctagaacgtgaacaggcaaatacggttgcttttgatccgattgccaccgagcaagcaaaagcagcgttgcctggcattcaactagcaaacacatggcaacaagcagtcaaagatgctgatgctgttctgctcctaacggattgggagacatttaaggacatttccttgccagagttgaaaaagttgacgaagcaaccgatcgtcattgacggccgcaacatgttcgaccctaaagaaatggaaatgcacggcttttattacgattcagtcggcaggccggtcgttgatgggcggcttgaacgcatccgtgaatgggaagatcttgtgctgggggtttatgaccgcttcgccaatggatagatgttgaacctgaatgatgttgctgactttgtcggcaacatcattcaaattgtctattatctggagcacgactctttgttgtaggacaagcaaaggaggagaccatgctaaaaaattccctaattgcctgtggcattttgctgtttttaagtggtttcttttttttagatgagggagaagccaatccatataaagaagaaaccacgaccattgaccagaagacttttatggaagtaaagcttgctcatgaagctgcaaaatatgtactcgagaatcacgagcagcaatggtacagccatcattttacaagaacactttcggaagaagaacaagctgcttttcttgctatttcgttagaaaaagaggccgaagttgcagaagaaggggaagaacaggtggccctttcttataatggcacggtcgtctcgtatgaaaaagtggacaatgtttggaaaatagcgcaagtggaggaggcgcataggcagtggaacaacaaccacttgtatcaataattactcctgtttataattgcgagacctttttacatgagacgattgaatccgttttagcgcaaacatatgccaattgggagctatggctgatcaatgatgcttctagcgatggcagtaagtacattgctgctcaatttgcagaagcggacagccgaatcaagctcattgatttagaaaaaaactgcggtgcagcagtggcgcgtaacaaaggcctggaaagggcagaaggcaagtatgtggcttttttggatggcgatgatctgtggcggcctcagaaattagagaggcaagtcggttttatggaggagacaggccatttgttttcgtttacgagttaccggattatgagagaggatggtacagagcgcagcaaagtggttgaagcgccgtctgtcgtcacgtacgagcagttgctttccaacacgattattgggtgtttgactgtcatgttaaatcaagatgcattaggaacgctgcaaatgcctacaataaggacgagacaagatttcatgctgtggctttcaatattgaagaatggctactccgcttacggaataaaggaggagctggcggtataccgcaaagtaggcaactcaatatcaagcaacaaatggcaagcggcgaaacgaaactgggaaatttaccgaaaacatgaggaactgccctggctgaaagcgtgccgtgtttttgtcggttacgcgtggaatgggatgaaaaaattgtaaggaatttaaagcgttttaagggttcatgaagaacatgtaaattgtcccttttattcgatagattttgctattcttgcttaagtagcaacttgataaaaagaatagcaaaagcgagggtggcaaacatggaagcttacatacttgcaatcattagcagctttgcggcagccatcgcggtcacaccccttgtgatcaaatgggcacatcgctttggctttgtcgatcagccaaacaagcgaaaagtacatcaaaaaccaatgcctcgcataggcggtttaacctttatttttgggacaggaatcggattgttggcagtggcagaccagctggcggctgattggcaaacgacagtagcaattttggcaggcgctttaccaatcatagccattggcttacttgatgataagttggcgctccgagctagaacgaagttgttgttccaacttctctccgcctcgattgtcgtcatcggctccggagtgtcgattgactttatttcaatcccgtttggagaacggattgacttaggcctgttaagcagtattgtaacagtgatatggctgattgcgatgatgaatgccattaatttaatagatggcctggacgggcttgctgcaggcgtggccatcattgcgctaagcacaatgctagtcattgcggcaggaaacccagctgcttatgggcttgtcttcgcctttggattccctttaattggtagtattggcgggtttttgatatttaactttcatccagcgaagttctttatgggcgatacaggctcgctgtttctcggatacatgatcgggattttatcaacaatgggctttttcaaaagtgtaacgattgtcagcgtcgtggtgcctctgttcatactcggcgtacccattcttgataccgtgtttgcgattatccgccgcaaactgaaccgacaaaaaattggttcgccggataaaggccatcttcaccactgcttattaaacagaggatacggccacaggcaggcggtgttgacgatttatggcgttagcctcttgttcgcagcttgtgcaattcttttgtccatgtcaagcttatggttctcactgctcgtgttgatcgttgtcgctttgctgatccaactatgtgcagagtgtataggcttaattggcgaaaaacgaaaaccacttttaaatacgattagaaaatgggcaggcgcaggggcgccattaagaagcaaataacaaagctctggtgcagtcagctggcaccggggctttgtccgtttcaagcggaatgctggcatatcatggcacagatcaggtacgattaggaaaaacgccttggaggagatagtatgacaacgatcaattgggcaatacttggcccaggagccatcgccagcgattttgcccaagcactaaacaacatcaacggaacgatttatgcagtcggttcaagatcgattgaaaaagcgcaggcgtttgcaagcaaatttgatgtcaagcatgcgtttggaagctatgactccttgcttcacgatgaaaacattgacgccgtttatattgcaacgccccattccaaccactatgaatacattaaaaaaagtttgcaaagtggaaaacatgttttatgcgaaaaggcaatcacggtaaacggccaacagcttgaagaattaatgagcctcgcaaaagaaaaacaacttgtgctgatggaagcaatgaccctttttcacatgccgctctatgccaagttacaacaggtgattcgttcaaatacgctagggcctgtcaaaatgatcaatgtcacatttggcagtttaaaggaagcgaacccgcaaaatcgtttttttaataaagaacttgccggcggggcgattttagacattggcacctatgcgttatcgtttgcgcgcttttttttagaaagccagccacatgaagtgttgacgacggtcaagccgtttgaaacaggcgttgatgaacagtcgggaattgtccttaaaaacaaacaagaacagttggcaacaattgcactagcaatgcgctcgaaaatgccgaagcgaggcattgtcgcctgtgaagggggctacataaccgtcgatgacttcccacgggcccaatcagcgctgctcacttatcctgatggctcaaccgaggaaatcaccgcaggccagacagaacatgccctccaatacgaaatccaagcgatggaagcagcaatagccggccaaggagacacacatatagcgctctcccgcgatgtaatggagctaatggataccgttcgccgccaatggggcatcacgtatccatttgagtaaccgcagaaaaagaagtttaacatagcccgataacgtctatttagataaatacacatctaaaaggaggcgttatcgatggcaaacggaacaaccgacaaaatgaaaagcgcagcaaacaaagcaaaaggagcaaccaaagaagctgccggaaaagcggcagacaataaaaaaatgcaagcagacggcaagaaagacaaactaaaaggcaaagcccaagagatggagggggaagctaaagagaggatgaaggagtaaaataggcttagtattgggacaagagatatagaaaaccaaaaaggttccgatcatctaaaaaggatgattagaacctttttgtaattatttttgctagctaagtcccaacctcgtttaaaagctgtcggccccgccaacccctcctaagggctggtgactatccatagtagtaggatataagggagaagaacttaaaacaaaggctactaataaggctactgatagttgtcttatcattttttaagcctccttttagttgagcgttgttaatatcaatttgtcgaattcttcaaacatccaataacagacaggaatctctccttcctttgctgcaatctttaaagcgttcatatagaaagaaatgttatttgtagctttagcacgataaaaaaagctatattttgaagcaccgtacttactttcctgtaaatttaacaattctaatgctctttttctattgcctcttactatatgttggtgtgcttgttcctctaaatcaactttttcatttaaatcaatatacttattatgaagattatgcaaaaatacaatatcttgatataaaatactatctatttggtcgtgggcattaatttcctcataaatagatattgctaactgaaaatgctcataggattgatcgaatttgtttttttgatatagataaatttgtcctaaaatcctataagcagctcctaagaggatgttttctgaagttggattaacaacagtgcttaaagcataaagttctgccttctcaaagtcagcatgagtattcaagtagcctagagctaagttacaagaaaaacgagcagcgaagacagtttttaagtatcgattgtccaattgactaatcgtaatttcaagtttttgtagtaaataaaatgcagtttgtaattgtttcatccttaaaaaggctgtgaattctaaaagctttaattttatataagtagcatcatgttcgttcgtagccaacaaagattgggtactaattaaaagattctcagccgatatgttattctctaataaacgctttcctaaactataaactttacagcaatgagtcaataatacatcgttttggtgacgattgataagataatcaataagtgctaaatctttataaacaaaagcaaattcaaatgaagaataaacctcttggagcttcttagcgtctttacaatatgaaatcatgagaggtttgaaatgatcttcatccacatacttcacgatcgtcaatatatcctcaaactctagcgaaggatactttttggtcaattgtacaaccgaatcgtatgtaagcgtttgtccacgtttcatgccttcttttgccagtaacgccttgttttcttcactgatccaagccaagctggtcacctccacgatatccggtgtactagcactataacataaaaaagtgctagcaatagcgggtttgacattgggaaaattcgtttattgcagttgggaattttccatttttgaagaatgaaaacatgaaaaatccttaaaatggcagttaggtaaatgtcattcctattaactaatagtatatttcccaataatagggtaagtttgtctgggcgtttatttactttaagttaaaatttgcgtactgttattcaaacggccaaagctgttggtctcaaaggcgtttgggggaacgtttgatcaaagagaaaccgtcattgttaaagtttacggttgacctcgcctgtcttagtccgaggcttatttttgtcgcagcacactttcgactttatcacttgtaattacctggtttttttaggcttgaaatagttaaacatgtaaatggatttttttatgcttgatatatatggaaaaagaaggggtatatacgaatggattattcagcaaacattacccggttgagaaatgaagttggttcgcttcgtggagaaattgcgtccatccagcaagacatcaggcgtcttcaagaagcgaaaagcactcttatggaacaacaggtctctttccatcacgaaaaggcacagttacaagaaccaggtttaaccgctggggtatggcatggaaacgaagcatatgaccatgacactaagcgttctagtttagagacgtcttatcgagcctctgaagaccagttggaagagatcatttcctcaattgaaaggaaaatcaaccttttgcgaagtgatattcaacacgcacacacacttattgacgttaaacaatcgcaagtagcgatgttcaagcgtctgcaaaatgaatcagggtgatgaaaatggcagaaatcaaagtgaatgaaagtaacgcattagaagtgtttcaacatgtcacaaaggctgcaactggcttagcttcaatagaagcaacaattgaaatggcaacatcatcacttgatgttcttgagcaacttaaccacttggagaaagcatatcaagcgcagctcaagtcgtatatggaaacgttaaacaaaacgaaacaagagagccaacagctaattaaaatatacggggaaatagaccgggctttggccaatcaatgaagaaaggagcatagctaataaaaagtatgttgcctctgattttttctctgccctcgataagatcgactcggacatgaatcagtacacagagacattgagcaacgttcattctgctattcaaggcgtcgtgaatttgggagacaatctcacagggcaaggcggagaagcgctcaaaaacttttacgccaataaccatgtgccgctgctttcctattggacgatggcctgccaacaagttaaaatagctacaaaaaaatgcggatgaacgcgctaagctttgagagcagcgatgcagtgattgatgaaagctttattgaaggagaagtcattcctcaattagaaaaaaatcagcgaagaatccaacaacatcaagacagaattaatggtgttgttgatagcgtctcggatattgtgtctttgcctaaaattgacacaagtgccatacagacagggatacacgaggcgaagcagcatgcaatgaatacggttgaaaagctctatgctttcgattatgcgcaatcagcagcggtcgaccaactgatttcgttgatggcgccaattagctcgtttattgacggtttaaatggggcgattgaatcaggtgttagcattacggcacttgccggctacattgcttcccaagatgtgccgccagaaataaaagcgatgcatccgatgttaaatggcacgtataatgtattgactccatatcagaactttaacgaccaagcggtacatacacagaacttcttgctttcgccaaacccgtttggatttattcactttagcaatccgttcattgcaaacgtcgcccatcgattttatttggcgagcgggaatattgatgtggttcatcattactcgccagaccatcagattgcaggtacgactgtcgacgcgaacgggaacgaaattcaagatgtatccaagatggggcaaggagagattattaacgattggggaaacgggcatgttgaagtaaaaggggagtatgtagatatagaagcattaaaagacgctggggtacgtgtacatacgtttactactgtgtcaggtaaagaacttcattatacagttgaaaatggagaatttatcttttttagaaacgaacccaatgtacactattatacaaatggatatacgcaaactaaagtaaattcatttttggcaagaggaacaatgttttttggggcgatagcaacctatcatatagcaaaatctttccggcgaggtgaatacaaatcggaaaaagaatggaagaaacttaggggacagggacttgatagttccaaaacgaataaagacaaaactattatgatggaagaagttaaagacaaaacgcttaaagactttgcgcttgatcatgcgaaaaacgcaataattggtacacttccaataataggaacggagtttcctaatgctggagaacaagagatcttaatctggcttagtgaggatgaaggggaaacttgggataccaaggtctacgttaaggtcaattcgaatggcgcagttacaatagaagactatgaagaacgtaaaccgtcaggcattattggtaaggtcgttgacttttttaccgatgataatgataaaaagtaggtgagtacgatggagaatggacaaaaaaatcaagaaatgactatattaaacaaaatccaggcctttattctaatgcctggatatatgatggttgtctcgtttgttttatattacttattaacgtttagttttattaaggccgaggggataatcgcaatcatttcgtttccgttgtttttttgttggatatacgttccgctttttagagaataccaatttaaagaaatgtattacaaagatggcgatatgcctataaaagttaaaattcaaaaaaacaagcaattaatgcttgaatacagcagtgcagcagctgtatttacaactggtttcgcattgatatttcatatatagcaatttttaattaggaggggtagggcgatttcgccctacacttttttgttgaacaaaagatcgttccttaatagctaaaacaacaagggtaaagaccaatgttgccatttgtgggctttctcgtaatcgtaggtgttctttttcattctaatttgtgaatttgatgcaatattaattcctataatatgattggtttaagtattctctcaatcatttcataaatctattagcataatattatggtctataaacgaaaaattatttcccatcttcaacaaagttgtagattcagttcccaagataacaagtaggtgattagaatggaacaacatgacgaaagaaaaatggatttgcgtaataaatttcaagcttttgtgctaatccctgtaattataatggtgaacgcattaataatctattttatttttacttttggtcaaatgaaaatggaatgtttgattgttataatcgcagctcctttatttacttgttggatatataatcctgtctttaacaagaatgagtatagggagatgttttatgatgatgcagatatgcctatcaaagacaagattatgaaatacaggccaacacttgcaggatatggggcaataacgcttattattgctttctatgctcttttaatacattactgagctagttaatccgcattccgtctcgaaactaagagattactctatatttcgagacggaatttgttttaaacattaactactaaccataatagcttttatttaattatagaagtctgtaaggttttaaaaccagtgacacatagaatctatgtacaagttgataaaaatgaaagcaacaatgacagactacgaagatagaacgccagaataagatgtttttaaaaaaaacaataaagcaaaggattggggatacatgaaaaacataaatggaaaagaaatcaaactaagccgaaaaaacaagattgttgcttttgttctattgccgatttatatgatcactgtttttctaataagctatacagtgggtcttgaaatagctagcaaatggtatgatgcaatcgcgattgtcacattcataataggggtatttgtgctttgtgccatactaaacccaattttcaacgcgtttgacttctatgacatatatgtggtgaatggagaattaagcctaaagaaaaaaatgaaaaagtttaaagcagctttcataacattcactcttatttctgttgttgcaggcttatggagagggataatttaacttgattttaaaatgagaattataagcaccctcgttggggtgaacagcgggggctcttttctaatggataattttcctaaagtgttttttgcccatgggacactatcgtttaactattcatcgcaaacattgtgacaagtgttatcgaacgttttgtccgactgcatttgtaattaaagaggggggccaattcacccatgaatgagaaaacagctaaattaacaccaaagaataaacttattgcatttgtactactccccttataccaaatcgtattatttttaataaccaacataattgtcatgtatttaaaaggaacctggttgtactttgatgtatggggatttttaggatttttgataatagtacttgctgtttgttatattctcaatccagttttcgatgcatttgattttaataatatctatattagaaatggagaggcgtcattaattgagaaaattaaaaggttcaaggggatttttataatatttacggttgctccaatattagcggggctacttgcgttgaatacaaactaacacttgcaggatacgcagcaatcgctattggtattacagtttggcattgattatgcatcatggataaatattcttttccgtctcggaaccgatagattactcgatatttcgagacggaatttggttcaaacgtcatctataaacatattagcttttattttaatatagaaatctgtaaagttatatataaccataaaaacatattcttcgtctacgtcccaatcgttgacttttttactgatgataatgataaaaagtaggtgagtacgatggaggatggacaaaaaaatcaagaaatgactacatcaaacaaaatccaggcctttattctaatgcctggatatatgatgatcctctcgtttgttttatattacttattaacgtttagttttattaaggccgaggggataatcgcaatcatttcgtttcctttgttttttagttggatatacgttccgctttttagagaataccaatttaaagaaatgtattacaaagatggcgatatgcccataaaagttaaaattcaaaaacacaagcaagcaatcattgaatatagcattatagctgtatttacaactggtttcgcattgttatgtcatatatagcgatttgtaccttagaagcagtagggcgattttgccctatacttttttgttgaagaaaaagatcgttccttaatagctaaaattataaatgacaaagaccaataaatcacatttgctccattgtggattttctcataatcgtagcaatacaagctctatagatcacaagaagaaaaatggaactaaccctaagtggaatgaaggtaaaacgtgggatacaaaagtatataagtgagtgctaatggggcggtcacaatggaggattacgaaaccgcaaaggtggatttttggataatatttttttcgatcagacgataaaaagtgagcgttaggggtgccatatgacaagtgaaaaacagatgagtaagaaggcaatgttgcaagcatttttattatacccattaatgcttggtttttctgccagtgtcattattacaattctgagagtctttgaaccaagtagtagcagtattaaagcaatttttttctttgcctttgcaattagtttcggctacgctccattacttggaatcgataattttagacatttttttatcgaacaaaaaggtaccttaatagctaaaattaaaaatgacaaagaacaacaattcgcatttgctgcatttgtgggctttcttgtaaccgtaggtattctttttcattccaatttgtgaatgtgatactgtcttgaaactaagatatactccatatttagagatagtatttgcttcaaaaatattgattcctattaaatcgatcccatgtagattgattgtctatccattttcgtctagctacatgattaaaagagagttaaagaaataagaatgtcctttgttttaaagcgaggaaacagctctcacgcgggtcatggatgattgtacccacattgacgcaaatagcacgtttacggctgaaagagaattggaacggaagatcacggtttctatgatgggtttaagtattctcttaatcatttcagaaatgtatgtattcgcataatatcatggtttataaacgaaaaattatttcccgtcttcaacaaagttgtagattattttagttcccaggatgacaagtaggtgattagaatggaacagcatgacgaaagaaaaatggatttgcgtaataaatttcaagcttttgtattgatccctgtgattataatagtgctcgcatcgataatctatctgatctttactttaggtcagattaaaatagaatgtttaatcgcaatcataatagcttctttgtttgtttgctggatatataatcctgtctttaacaagaatgagtatagggaaatgttctatgaggatgcagatatgcctatcaaagacaagattatgaaatacagaccaacactagcgggatacggaggaataacgcttgttattgctttctatgctcttatcatgcattactgagcaaattaattcgaatgccatctctaaattaataaaaatgtcagacaaggatgagacgacatggaaacaagcggtcattatgatgatcttactgagtgtactgttaatcatctcagaaatgtttttatttgcttgaagactctagctaatggatcgtaaaagataaactaattggatactttacaaggaataataagtgtaaggcaggtgagatatatggaagaaccaactacatctatgactttttggaataaaatacaggcatttttgttgatgcctgaggttgtcgacaaagtcgataaccacactcagactgatagaaaacgcttgtcagacgaggagtgcaggcgagggaagatgcaaatagaacgggggttcatgagcatatgagtgagacaaacgacgacgtatgcgagcgtttgtctacagtctgaggcatttttgttaatgcctctttatatgatggccgtttcatcattactgtattttgttgcctccttaacttttataagggcagaaggagtcatgaccattgcgattttaactattggtttcttctggatatatgttccaattagtaacggatttcactttaacactctttattatcaggacaaatccctatctatcaaagcaaaagttaaaaaaaatagtcgtgctatagcagaatatagcatcattgctgcatcattttcagttgttgctttcctatatcacttcacacaataatggaacatcactatttttatctcgatacgtatgattttactcaaatatatagaacaatttatttcatggtttgagaagcgtgccttaagacaacaagtaggtgattagatggaacaacagaacgaaagaaagatggattggcgtaacaagtttcaagcttttgtgttgatgccagctattattatgatagtagcatgggtgctctattttattttcactctaggacaaatgaattatcaaggggtgattccagtgattgcagcccctttaattatttgttgggtatgtaatcccttctttgaaataaacgaatataaggaaatgttttatgaggatgcggatatgcccatcaaaaacaaaataatgaaatacagaccaactcttgcaggatatgcagtgaccacaatgggcattgcagtttgtgcactgataatgcatcacggataaagtcattttcatctcggaaccaataatacccgatatttcaagactgagtttgttttaaacattaactacaaacgtatagcttttattttaattatagaatcctgtaaggttttaaaaaccagtgacactagaacctatgtacaagttgataaaagtggcaaagcaacaatgacagattacgaagatagatcaccagaaggactcataggatggctctatgataaaacaataaagcaatggattggggattcatgaaaaacataaatggaaaagaaatcaaattaagccgaaaaaacaagcttattgcttttgttctattgccgctttatatgatcatcgtctttttaataggctatacagtgggccttgagatagctagaaaatggtatgattcaatcgcgatcgtcgcattcataataggagtatttgtgatttgtgccatactaaacccaattttcaatgctttcgacttctatgtcatatatgttgtgaatggggaattaagtctaaaggaaaaaatgaagaagtttaaagcggtttatatagcattcactcttttttcttttattttcggtttatggacagggatattttaacttgatttaaaatgggaattataagcatccctcgctggggctaacagcgggggctcttttctaaagaataattttcctaaagcgtttcttgcccatgggacactatcgtttaactattcatcgcaaacattgtgacaagtgttatcgaacgttttgtccgactgggttttgtaattaaagagggggccaatacccatgaaggagaaaatagctaaactaacaccaaaaaatcgatttattgcatttgtgttacttccgttataccaaagtgtgatgtttacgattggatatttgttttcttttaatataagcggaggaaacggtatatggagttttgtggggtttcttcttgtgacatttttcgtttgttttatatgtaatccagttttcaacgcatttgagtttgataatatttacatagagaatggagatttaaccattcgagagaaagtggaaaagtttaaaggcatttttattatttttacagttgcaccgataataatggggatttacggttaatcccaatttcacttctgaaattaagagtgcatacacgaatttaagcatccctgctgaattaaagcaggggtgcttgtttatctcactttaccaaattcacggtttaaggactaggatatgcggcaatcgctaggtattgcgattcgggtattgattttgcatcagcgataagttcttttatcgcgaaaccaagaggttcatctatattcgagacggaatttgttttaaacatcaactataaacctattcgcttttattttaatatagagacatgacctgtttcttttgttggtacagaagaacgtatattatgggttactttttggacttacctaaaatgattcccctcaaagtcgctaaggggaaatacaggatcgaaaggtggtaaagaaaatgagagaacctgctaaacaagagattattgataaactcgagcttgtgctacaaaataaacttacaaaagaagaagtggctgactgggcctccaaatatgtggtgacagacgattaccctgtaacggatttaactgtttgcaggtttctaaagactgtctcaggcctagatacgctattggcccctggagaatacatgtatgatgatggtgatattaagaattggatgaacaagtattcgaacaagtgattatccagtcattcccgcaaaattagagcggcgatttttttgttttattccactctacccaatttacggtaggactaggattcccgtgactgaacctcctttcactaatcactcattgctagctaagccttgtctttccaaatccaaaagccgtgtcttcatttcgaatccaccacggtagccggttaatgcaccattctttcctactacacgatgacacggtacggtgattaatactggattcgctccgatcgctgcccctactgctcgaacggctgatggtttatttatagaattggcaatgtcggaataggacctagtctgtccgtacggaattgcacaaagtgcgttccagactgcaagctggaatgctgttccatcgtaatcaaatggaaccgtaaaggttttccgttttccttctaaatactcggtgatttcaactgcatagggctcaagcttttcagcagtttcaaccaaaggacttccgctaaagcgctttttagcccattcggacaattcctcgaatggtttgttcggtgagccaacaaacgcaagtcccttagatgtggaagcaatataaaaattcaaatccttaaacgttagcaaagaccaataaaggattggtttgttctttgattccattttaccgttcctccattttactcatttgacgaaattgtgctggtgtatgtcctattttctttctaaataaagtaataaaataggacgtgttaggcatacctacacttatggcgatatccgcaatcgctttatttgtgtgaatcaaatactctttagcagcgtttaatcgaacctgttggatatattcgactggtgtgatgcctttcatttttttaaacgttcgatgcaaatgatagggactcccgtgagcaatatctgctaacgtttctagagttaacttttcactgaagtttttatcaatgtattccgttataagagctacccattcacgatcaggcaagctctcattcgtaggcttgcaacgtttacaagggcggaaatttgcatcgagcgcttgttttgcgtttgaaaaaatacgtacattttcttttttaggaacgcgggatttgcatgacggtttacagaagatcctggtggtttttacggcatagaaaaattgattattgtacgaggcatcattgtctataattgcttgccacttttcctttgtcatcaggttctcgtcaggcaaaactccatgactctgttgaaatggatgattgatacgatccggcattactctcacctctccttacaatatccccccttaatggcggctctgtatgactcttcctcactataaagtttgttaatattgctgaaagctttgcaaaatccttataaattgaatccaatttaagcattttacattttatatcttggcttgaaccatttttatttccttctttttagcatctttaatacctaacactataaccttataaataaaaaaatataaggtgtttagaatgtaatagcaagataacaaaatcagtactgattattatgtgataaagtgaacttcaatcagtgtgagttttcttggtaatagtcataaagagaggagatgaaaaagtgacatggcatgaaatcaacgatgagatgattattgcattacctgaagagtttgacatgaatgctaacctaggctatctaaaaagagaaaaaaatgaatgtatgtatgaaactgagaacgatcacattacaagaatgatagccattggggaaattcggtccttgatacagataagcgtcattgataataaacaaatggttgtccagtttttaaatgattctagacctagcgaagagtggcaacgagaaaaaattgtaaaatatattcatgaatggtttgatcttaataccgatttaaccccattttatgaaatggcaaaagcagatccattacttaaaaagacggttgaaacattttatggattgcgagtcgtcggcattcccgatttatttgaggctttatgttggggtgttctagggcagcaaattaacttagcgtttgcatactcattaaagaagcaatttgtagaaggatttggcgattccatcgaatggaatggtaaaaagtattgggtattcccaccgtacgaacgaattgcacagttaacacctaccgacctagcaggtattaaaatgacggtaaaaaaaagtgaatatatcattggaattgccaagcttatggcaagtggagaattgtcgaaggaaaaattaataaaaatggactttaaagatgctgaaaaaaacttaattcaaatacgaggcatcggtccttggacagccaattatgttctgatgcgctgtttgcgatttcctaccgcttttccaatcgatgatgtcggtttgcataatgtaattaagctactcacaggatccgaaacaaaaccaacaaaaaaagaaatcaaacagtatgctgccgcttggacaaattgggaagcctatgcaacgttttatttatggagaaccctatattgatgtattgttaaaatggagaatacaacacaatttacaagggagtaggctatacagcccatgaactggtttgaaggttcatacgatacgatagaagatcaacaaatttctaccagcaaaatatttcagggtacattagatcgttagctaaacagaggagttttatggatttcctctttattcaattcacggtaaggactaggtgggtttaaaaccgccacaacccatccagctgatgcttgtccatttgccttaatcgcaacgaaatctgaaatagaatctgaaataggttgctatttttcatttacgaaatagaatgaaagcgctataatgtggtggactgaagggagagtggtgacatgaaagcgttaaaggcaggcattgtcggttgtgggaatattagtgatatttattttcaaatgaataaccgatttgatgcaattgagattattgcttgtactgacttgaattttgcgcaagcaatgaagcaggcggaccgctacagtggcgtggaagcaatggaaatggatgatttttttgccaatcaagacattgacatcgttattaatttaactacgccgtctgcccactatgtcgtccataaacgggcgcttgaagcgggcaaacattcatatggcgaaaaaccattagcgctaacgcttgaggaagcagatgaactgcaagcgcttgccgacgaaaaagggctgctgttaggggctgctcctgatacatttcttggcggcggtttgcaaacgtgtaaaaaactaattgatgacggctggattggaaagccggtttcggcaaacggatttatgatgagccatggcccagaaagctggcacccaaatcccgacttcttttataaagtcggggctggtccaatgtttgacatgggcccgtactatttaactgcgctgatctctttgcttggcccaattaagcgtctgacagcttcggctggcaaggcatatacagaaagaatgatcacgtctgcgccaaaatttggtgatacgatatcggtggagacgccaacccatttagccagtgtgcttgattttgaaaatggggcaatcgccacgctcgttacaagctttgatgtatggggctcaaagacgccgaacttagaagtacacggcacaacagggtcgttgcttttgcctgacccgaatacatttggcgggcccgtttatgtgaagaggcaaggagaacaagagtttcaagaagttccgctcctttatggcttccaagacaacagccgtggcctcggcgtgcttgatatggttcatgccattcaagaacgtcgtccgcaccgcgcaaatgggcgcatggcttaccatgtccttgaagctatgcatggcgtccttgcctcatcagaaaatgagcgctcttattatatgaagagtagttgtgcacagccagaggcgttgccactaacaatgaccacaagagggttttaagaaccatacttgccgaccttcccttatgtagggagaggtcggcagtttttttcgttccttggtttcgctgtctttcgccgcataaaaatgacgccacattgtgcttcgcggcaaagtaggctaaaatcgaatgtgagacacagtgcggagggatgcatgtgggttattctattgacaaaaagaagtttaagctgttcaccgttcactccaatccattgctgacaaatgaaatcgcttctttgctcggttgtgcagttggaaaaagttcggttaaacgctttagcgacggcgaggtgcaaatcaatatcgaggaaagtgtccgcggttcaaaagtgtttgtcgttcaatcaacatcacaacctggcaatgaacacgtaatggaactattgattatgatcgatgcgctaaagcgggcgtctgcaaaagaaatcaatgtggttattccctattttggctatgctcgccaagaccgcaaagctcgggcacgtgagccgattgcagccaaactggttgccaacttgctagagacggcaggggcagaccggattttaacggttgatctgcatgccccgcaaattcaagggttctttaatatccctgttgacccacttcaagggctgccacttttagcgcgttattttctaaacaaagcgcttaagcaacctgtaattgtggcgccaaatcattctgggcttggccgtgcgcggcgattagcagaatatttggatgcgccaattgcctttatcgataaacgccacccagaaccagggtttccacaagctgtgaacgttgtcggcgacacagagggaagggaagcgattattgtagatgatttaattgatacggcggccactgtgacattagcggccaatgcgttgcaagaaaacaaagtgagtgcgatttatgcctgttgtacccatcctgttttgacagggccggcaattgaacggttgcaaatggcgccaattaaagagattgtcgtcaccaacacgattgaattagacgacgataaaaaggttgggaacttgactgtgctttcaattgccccgctattggcggaagcaatttaccgagttcatcgggagcaatcggtgagtacgctgttccagtaaccccttgcttgggaaagggaatttcccaaggaggcatatcgaaaaagagagaagcgtaggagtggaaaatatgtacaaattgattgcgattgatatggatgggacgttgttgaatgaccatcatgaagtgacaccggaagtgaaaaaggcgcttttagaagcacgccaagcgggagcgacaatcgttctttgtacagggcgtcctttaggtggcgtcacccgctatttgcacgagttggaattgaaccaaaagggcgactatgtgatcgcctacaatggggcgcttgtacaagatacgcatactaatcaagtcgttgtttcacatacgctccgctataatgatttagtcgagttagacgaactggcaaaaacgttaaatacgcctatgcattattttgacgataagcggctttacactggagaccgagacattagctcttatacggtgtatgagtcgtttctgacaaaagttccgttgcgttattgtccagtaaaggaagcggatccttcgatactcgtgccaaaagtgatgtatatagatgaacctgaaaaactggatcaggcgattgccgcaattccagctgctgtaaaggaacgttattccatggtcaagagcgcgccgtttttttatgaaattctccatccacttgtcagcaaaggcaatgcggtcaaacatcttgctgaaaagcttggatttgagcgtgaagaagtgatgtgcatcggcgacaacggcaatgacttgtcgatgatcgaatatgctggctgcggcatagcgatggaaaatagtataccagagctaaaagccgctgcagatatcgtcacaacttccaataatgaggacggcgtcgcccacgcgatccgtacgcaatttttgcaatatgctcattaacaaaaaaagggttggcggcgtttcgctgccaacctttttttgtgcctagctttggtaccaatacaaggagaagtcagtcattgtcgaagcatacccttgttgccttaacatggttgtgatgttgcctcgatgatacgtgccatgattggcaacatggagtaaaatttctgcgtaagccgtttctctagcgccagaccatggattattcacttgtattttttgttctaagtctttttggcgattcatccactcgtcatactgtgaagctagttgttcaaaagactgaataaattcgtctatagagtatcgattcgttttttcgacaagggcgatcgattcttccagtgcttcttgcatatcgattccttttaggacggcgagccacattgcatctacgacataaatgtggctaaacgtttgggcaatcgtcggatacgaactgcgcacctcatcgtataggacattgcttggcaattcgttcattttttccagtaatacgtgattcgcccaaatatgatagtggtacatcttttttgcatggttcatttttcagatcgactccttaacggttgatagctgtagtataaaaaaagatgtatgacaacagcctgtcatacatctcgataaacatttattattttttttgcctcatctactaaaaccgtttgtaattccacaggtttgacaattttaacgccgctgccaaagcttaaaagaatcgattttaaccatcgagcatgcaaaggttgatacacagaaatggtaaacgtcatacttccatcactgttcttaacttttgaagcatgctggaattggtccaacacttctactaaggaatcgcgacttacccaaatgacaacatcctcaaatcgttctagatttttagctgaaaaagatgtatcccttttcacgtcgtgatttttggcaaatgttttttctgtcagcgtaatattcatcatacgtgatactctaaattctctatagttgccccgttctttgcagtagccatataaataccagttgcgaaacttatattgaatgtgaataggctctatttcccgtgatgtccattcgtttttactacttacataatcaaagcgaatgatccttttttcttgtatcgcatttcgcagaccgattaatgaatgtgcttctgttcgatggctttctaagtcaactgataaaattccattgtttccacttggatcgagtgattttagcctttcaatcgtatggtcaattgttttatcttcaaaaatacccgataaactacgaagcaccgtaatgagattcgataggtcataggaaccgattaaacttttatcaaatttataccctttgatgataccgaacccaccgttcgtgccttggtatgaaacgactggtatcccagccgcacaaatggcttcaatgtctctataaatcgttcgcgatgatacttgaaattcatcagctaaacgagaagcggacaaaatctcattgtttaggagcttgaatatgatcgatatcaaacgttctaatttcaattgtacgttcctttcctcaataatcgattaagcgaccgttgtcattccattgaccgtacatgttattttctcttgtatgttcaataaactttttcaatcgcttattgaacgtgtccggttcatttcgataactttgtatcgtatcgattcgaatccttctgtatagttcaggaaaatgaataaagttctgatataattgctcctcttctttcaaacgagattctatatctttatcaattgtaaaagattcaggtcgcatatcggggagtgctttcattccttcttctctcatcaaacctaatttgtctaatctccgtactctttctttgtttaattctgtccaatgactgttcttttttctcggggaaagcctttgagctagttcagtatctgatattttcttttttaggccatcaatccaaccaacacataatgcttcttccacagcatctacatactggataacatttggttgttccgccatgcttacaattacccaacaacatttttctgtagttgaatgttcctcaagccaatctcttaattcttgccttgtcttaacgcgaagtaaattctccatttgtgaacgtacctttctttaattagtatttgtactgagtatcactcacacaaagggttttaaaattataccatttatccgattacttccaataggactaaaccttgattaatacctctccatattcaggcggatagaaacgcttgtcagccgagacgaacaatagaacttaggcgaacctattttttatacaccaaaagatgtatgcgcgacagaacgaaaggtggaaccacatttacacctgcctgctgaagcaggaggaggcccgttttcttaagatgagagtatacatcttagggagggatagcaatggcaacgattgtaatgattacgggagcaacaaaagggctgggccgtgctttagcttggcattacggaagaaaggggtacgctcttgctgtgacagcacggacggaggatgacttagtgcagctcgcctcggcgctgcaggctgaaaacataccggtcgtcgcggtagcaggtgatatggcggaggctgaagatgcggagcgttttgctgcccttacgctggcacggtataaaaaagtggatgtgttgattaacaatgcgtcgattttcgggcctggaccaagcttgttgcttgattatccagatgccgcttttcaagaggtattgttaacaaatacacttattccgtatttccttacaaagcaaattttgccgacaatgcttgcccgtgatagtggcattgtcattacgctcacttcagaagcaggaaagacagggtttgctgagtggggcgcctacggcatttccaagtttgcagtcgagggcatggtacaaacgtgggccgatgaagttgctgacagcaacgttcgtttccatctcgtcgatcctggcgaaatggatacagatatgcacgcccaagcgctgcctgattgcgattacttccttgatccaccacaaaagcgtttggctgtctttgactatttaattgaggaaggagccgcaaacggcagccgtgaagaagcgatcgtccaccaacagaaagagggggagcgatgatgttgattccgacagaaaagcggctagatgcagacacgcctcctgagaaacgggggcaaatgcgggacggcgttcgtttgctgacgtattggagtgacagtggacgaatcgtacacgggggatttttccaattagctcatcagctggaagcgggcgacgtgctcgtgtttaataatagtcgcacaatcccggctgaactaaaaacagttgatggcatccgtgtccgtttgtcccgtgaagttgaagacggcacttgggatgggcttattctaggggaaagcagcaagaagcttgagtttatgcatgggctaaaggcacttgtaacaggccctgggacagagccgccgttagtcaggcttgttttttcctgtagttccagccggctcctccgcgagctttataggcaaggggatgtgattcgctatgagcatgtggcccgctcttggccattgcaagattaccaaacggtctacgctagcattcctggttcggtcgaaatgccttctgctggacgggcatttacgtggcggatgcttgcccatttacaaaaacacggcattcgccttgcttttgtaacccttcatgccggtttaagctattatggcgacgacaaatggccgaatccagcactccatccggaagcattctccattgaagatgagcaggcggcaatcataaacgacgccaaagcgaatggaggacgggtgatcgctgttggaacgacagtcgtccgtgctctagaaacagcaagcgatggcaatactatcattccgcaagctggggtaacgtcactctatctttcccgtacaagcaagctgaccgctgtcgatgggttgttgacaggttttcacgaacaagaagcaagtcatattgatttgttgcaaacttttgctggtgaagaaggggtaaaagccatttataaggaagcggttgcaaagcgttatttgtggcatgagttcggcgacatgaatttattaatgaggcaggagcggtcgtgaagatccatcatctaggcctggctgtcgctgatttacaggcagcctggccttattatgtagcaacgctaggcttcaggtgggaatggtgtataagtacgggcgaggagcgctttgcctttttccgaaaagggccgttcacactggaactcgtggaaacagaactggaagggcaaacgctccatctcgctttttctttagccgatcatgaagcgtttgctgtgctggaaaataccaaaaaacgcggctttgcgcttaccgagcggtttctccttaatcgagacgaagagtcgctttattttgtccatccaaatggggaagaagtggaatttattgttcatccaaaaatgaaatgggcttagcaatccctgcttggatcgcaaacaacgcagcttgcgtccgatcctgaagctccaatttgccaaggagattggaaacatgggtctttaccgttttctcggaaataaacagcgcagctgcgatttctttattgctcttgccagtgctgatttctttcagcacgtcgacttccctgtctgtcaaacggttcactttgtcagcgacagaattggccgagcgcgcgacatgggtgagcacatgcttcataatccgggggtcaagaggaagttccccgctattagcagcctgaatcgtgtggatcaacacatcaggttccacatcttttagctgatagccacaagctcctgcttgcagtgcttggatcacaaagtctttttctccatagcctgacaacataaacacttttgcctgtggatgattgcgtaatatgacgtgtgtcgcctgaataccatccatgactggcatgtcaatgtccattaatagaatgtcggggcggtggcgctcatacaatgctaccgcttcttcgccattgcttgcttcagcaacaatctcaatgtcgggatgggcttctaagaaataggcaagccctttacggacaacatggtggtcgtcagctagcaaaattctcattccttttccccctttttatcaggaaagcgaatttcccacgtcgtgccactccctggtgcagatatcaataacgcctgcccgcctagttcttttgcccgtttgcggattgaatcaagtccttgtctgcggctaacgtggtttgtttcaaagccttcgccttgatcagaaatggttaaaagccattccccttgtgcttttgttaaagaaatcgttgcttctttcacgccagcatgttttttacaattgtttaatgcttcttggatgattcggtaagtagctaactctgtttttgctggccagtcaacctcagtaggaaggaggaggcgtacagaaatgccgattaagcggctgtactgttcgactgcttgtgccagtccagcctctaattcctctcctgaatggcctcgtataatggcccgaagctcacctaatgcggcgctaactaatttggaaacgtcagacattttctctttcatttcctcgtcttttgtccgaatagccatcccttgcaacgtcatgttaacggaaaaaagcaattggttgactgaatcatggagatcctgggataggcgttgccgttcatttaattcagcctgttccgcttcaaaggcaacaagctccacacgtttgatcgctgttccgatttgcaaagcaatgagttctaacaactccagttcatcttgtgcataatggtgtttttggggatgggccacgtttaagatgccaagtggctcttcacctgcatagatgggaactgtagcgtgatgggtaatgccgtttgtttcgccccagcctcgttcaatcgcccgttccaaacgttggcattcaatcatattaacagcccgttccaatgtcccatgtaggaattggtttttgcaccagcaaccgccctcttttaacggggtgcaattttttcgtgaaagtcctggcggaatgccgcttgcagcataaagggtatggtttcccatttggtcaattaaaaaaatccagccactcgaaaaatcgagctccgcaagcaatgtgtgcaacacgttatcaagcatacgttttaagtcattctcggcatttaatgtctgggaaatttgttttagcgtgtggagatggctcattatataaactcctttggtgaaaaggtacagtgtgaattcctctttctagtttagcataggagttctttgccgtgcgtttatgatgtttaaacaaacagcaaacgtgaaatagcaaggtaacacctttagttagaaaggaaacgaacatgaaacgacacacattgttgattattgctggatttttgctttttggggctcttgttggcggcggagctggcgccggtttacgctaccttttccactatttttgggccgatggtcagctgcgaggaggcgatttatggggagcggcagcgattgctgctgtaccgggaatggtggctagcgtctattggggttatttttaccgcaaaaaagaacggaacgaaaccaagcatttgcattaagtgggactcaacaacaaaacgtaaacgatttgtaaagactctgtgtgaaagcatggattctattgcagccaacacaaggatatcgtatagttaaacaaaatctataggaaattcccaaaggggagtagcataaaagcagctgtcgtcattacaggagcaatcctcggcactgctggcagctcaagcttcatgcgctgcttgcgagacctttgtccatgctgtgggcaaaggtcttttttgcgtgcttttgcctgcggcgtccactagaaaactaagggagagatcggttatgtcgaaattaacaaagctactaaaatcgaaagcggtacgggaaggggtcaaacaagcacaaaaacatcttttgccgggtatcaaaaaagagttggcaaagcgaatgtcaaaaaagcgatgaatgcggagacgtctacaatctatagagatgaattggccaaccttgtatttgtcaaacaaggcgggaagatagcgctaaaaaacactcctgccaattgggaactcatcggcaagggcaggagtgcttacgttttcaaaataataggggaacagcgggcgatcaaagtgttctatccgccgtttgagcatttggcgatggaagaggcacgcaactatgagaaagcagcgggtatttctttttttcctcgcctttacgaagccggtgaaggatacttagtgatggatttcattcgtggaaaaacgttttttgactgcttagcagaaggtgtggcgattacaagggaccacgttgcccaagtcgacaaggcccttgaattggcaagaagggccggcttaaatccgtctgacatccacttgcataacctgctgctgacagaaacaggcgctgtccgcttaattgatattgctcgtttttctcaaaaaaagcaatgcacacaatggcaagacttaaagagagggtatgagcgccattatggccaatattattttccgaaacgagtgcccaagtggttgatgcggattgtcgcctatttctatcagttacgaaaacgtttgaacggcaaacagtaagctggcccgaaaaatagcaacgctcctgtccgtctagtgatttcgctgttcttttaattgggcaatatcaggagaaccgagggcgcggttccagtcaacgagctcgatcttttctcggtttaacgtctgatgaatcgcttctgccaatgtggtcttggccaagctagccatgtattgttcttgcgcttccagaaaaatggcttcaagccgttttgaaccggcttctgccgctggaatctcagggaaaacatattgaattaagccttccgtctggaagaacgggcttgttccttcaatggcttcaagaatatcaagcatggtgatcgcttcaggcgatttggcaagggcaaagccaccgctattgccagggacgctcgtaatgagcttgctgatgacaagtttgcgcataattttctttaaataagaaggagacacgcggagacgggcggaaatggtatcgcttttgacatgttgctgccccgtttgcgttgctaaaatgacaaggatgcaaacagcttgttcaaccccgcttttaattttcattcgcttgcacacctttctatataaaaggttgttcgttttccactatacggctagttggtgagaaaatgcaatcctgtttttagatgggcaagttatggtattttattagaaagaaaggaaggtgcattcgtgtttacttttattggttgtggcagcgcgtttcatacaaaactaggcaataacggcatcatggcaaaagagagtggccagctttttttgattgattgcggcagctctacgtttcatcgtttgcaatcatttcatgtattagacggggttaagacgatccacgtcgccatgacccacactcaccctgaccatataggctccctgggcgatttgattttttattcctattttaaaatggaaccagcatttcaagcaaaagtaacagtgctagcgcctcaagcattgctgccggcgataaaggcagtgttgaaaggaaatggagtagacgatacccatgtcttttggcaagaaataaaagatgcctatatgtacgaagggtgcggcgggatcgagcttgtacctgtacaagtgcagcatgctgaaaatctgctttgctttggctacgaaatcaacacgaaaggcaaccatatttactatagcggcgatgccaatgcaatcagcgccgacgtgttgcaaaaattaaaagcaggacaatatgacgtcttttaccaagacacatgcacggccgattatccaggaaatgtccacttgtcattacgtaagctgatcgaacttgtccccgaagagaaccggtctgttgtgtgctgcatgcatgtagatgaggaattcgatttagcctacgcaaaaaaacaaggatttcaaacggcaaccgattatttgatttcgtgatcgcatttttgttgattgacaacgtttgcattaagctcctatactaatgaagatccaagtacaaagacaactgtggagggtttccatatgagtttagacaagcttttgtcttctggggtagtggctgttatgagaaagctgcctgtcgaagacattgaaaacattgccagtgctcttattgagggtggcattagtggtttagagattacgctcgattcagacgatgctttaggtgtgatcgagcgcttaagcaagctcgttggcgatcgtgctgtcgtcggtgccggtacagtgctaagttcagaacaagctgaagcggccattgacgctggggctaagtttgtatttgcccctattctcgacaaaggtacgattgaagtggcgaaacggagggagacgattgtcattcctggcgtatttacgcctacagaagcgtaccaggctataaaatggggcgccgatgtcgtgaaagtgtttcctgctgattgcgttgggccttcttttatcaaatcagtgaaagggccgctgccgatggtgcggatgatgccgacagggggcgttgatttaaccaacttagcctcgtttataaaagctggtgcagtcgcagtcggtgcaggaggctctttgctcgataaaaacatcattgctgcccgcgattggccacgtttgacggcactcgctaaacaatacgtcaattgtgcgcaaacggcaaggggcaactaaaacagcgactgtccctattaagcaacgaagcgtaaaattgaaaacaagaacaatgattcatagataaaagaatttgtccaagagtggcgggaattaatgagtaagagcgtctaaaaagatgctctttttttgttttttactagttctctcaaagcttgcctgtgtggggaaagcgatttcataacgccacatacaaagcttcttgccatcgcaggtgccgttgtattggtgaaaagtgggaaaaataggggatgccttggtcagagaggaaaaggtagacagttgagaaatcgaaatttcccaactgcctaaccatttgtcgttttatagcggcccttcgtagtacacgtccagccaattaaatgagatgaacgaatcgcttgtattgacgaattgcccttcgtagacgacttcgttggagcttaagtgaatggctttaacataggcaaggatgtcttggtggttttgatccacagtaaacacatacaacacgccgtctttacaggcaacgctagcgatttccccattgatttcaaaagtggttgcttcaggaagcggaccatcatgtttttctaaatcgataagatgataggataaattgcttccatcctgctgtaaaagaataagctcattcccgacttgaaaatgttcatacttgaccatgtctttcatcgccaatgcttgctggacttcctcgctgttattattgtcttcagacaagacattaagctcttcgctatcatagctatacgaataaacttgttcaatttctgtgtcgccttctggagatacgtgttcaatcgcccaagttaaatagctgttcggcgagaaaaagctaaaagggtatgaatctagataaatatcggctttgcttatcgtacttacgtattcttcagacccactgaaatgggcaagttcctggcgttcttcgatttgtttgcttcccggatcaattttataaagagaaacgacttcgctgttgccaacggactcgagcaatgcaatatgcaagagcgaatcgcggatctgaacatcaaccaagtcaacttgcttagatggcgtggtttctatgcgaaagtccaacgactgcccttccgagcggtcgagccagctaatttgaagtgaccgtgttttttcgatcggatgaaactgagagggaacgtcaatatggacaataaaatcttgatctacgtataacgagttccatgtatcttttcctctaaaaaaggagcggaactgtttttgcaattcattaatagccggatttgggtgctcatcaagcgattcaagaaaggaaggcttgtttagctttccatacaaagggacagcataattcctttcgttttgccctcttatgccaaaacctgcaatgatttcttcagagccagatatcgttttaagctcgatgccatcggcgagttcctttatatcttgctgcttaaacgtgtaactaaaagccaaccaactaaagacgaccatactaaacacaactaatgtcacgctataccaatatcgtttcatcataagcctcctacaccgtcacatatttggcgatgagccgtctggacagcagaagattaatggcgattaacagagtgactagcgcaatccccacaaagaaacgctccgaatcataaatttgccctgacagcattccgagagggacggtcgccgcacataggacgactcccccataagaaagcgcaaaggcaatccctattaaacgaaaagaccgctcaattaaaaccattgtaaaaatcgttgttaatgcgaatagcccacagccaaacatgataaacagatccataaagtagttttcagtgttaaacacatggataaagacaaaatcaagtgtggcattcaaattgcctgtttctaaaatttcatttggcaggcgcagtgataaaaacaagtcttggagtggatacaaacacaattggaatgcataaacgacgatcgccatgaaagcaatggccgatagtttagcaaaataaacgtgcatccggctgtttggcaacatgagcagcctgtgtatgaaagggtggctgccataccactccttataccaaatcaacaacgcgtaacaaaatagtgcgccaaataggaagatcagcggacctacataaagggggctgaacaaaaacaaactaatcgaaatagggccgttttccattaagaactcggcagcagttcggccagatgccaaatgagcgttatattcgtttaatgtagtttgcgtgtagatgaagacgacggcgaactgcatgagtgcaaacaagccgagccccccgagaaacaaaggcatgacgcgcctcagttcaaaatcaaacaattttaaatagcttttcatgactggtatacctcacgcattacatcttcaatcgacttcccttcagctaggcgcatttcttctgtatcgaactgcttaaggacacgcccttcatcaagaaaaacgactttgtctattaaatgttcaatatcattgatttcatgagttgtaataatgacgccgcgatcttcgagaaagccactggaaaacaaatcggtaatttgttcgcgactgaaaatatcaatgcccgaaaacggctcatccattagcacgtagtgtgtatctaacgataggccaaggagaaggtttactttggctgtattcccctttgataaatcagcaatttttgccgcacgatcaagcttaaagaatttaacgagttcattggcgcgctcatcgttccagcttttataaaagtcgcgcataaaaacaattgctttgtcaatcgtcattgagggcggcatcgggatgacgtcaggaatgaatgtcaatgtttcatatccctttggcgaaagtgtgctgccgtcgatcttaatttctccgccacttaatggagttaaattcgcaatcattttcaggacagtcgtcttgccgacgccattaatgccgattagcgcagtaatttccccgcgtttggcgatgaacgagacgttatgcagcacagctttgcggccatatttcttcgagacgttttttacttcaatcatgttccgtttccccttccttatagctagcttggatcatggcaatgacttcgtcgagcggaacttggatggtgcggattgcttgcaaaaatgtatcaattgactcctggattaattcatcacggacggagtcaagtacgtcttggtcatacgtaatccggctaggtttgttccgttcagtatgaatcaacaattgatcctccatttctttataggcacgttgcgctgtgtttggattgatttttaaagtcgcgcctagttcgcggcgcgaagggatttcctgcccggcaacaagctttccggtagcaatttgctccttaaagtagcggataacttgtgcgtaaacgggctcgcgggtgttaaattgaatgttcatcaagcgctcccttctttttatgcacgttccaatttatggaaatgaagatatccattttcggttctatactcggttttcccatgatagaggatttgtccgtcttctagtttaactgtgtaaatactatagctggaaacaatcggattttcttctggcatcgtttcgtctataagcaagtgaagaaagccgttttcctcggtgaaaccagctatatagtggtcttcattttcggttagtacctttggcagttcaccgatctgggtgatcttatctggagaatccgtttcaaaacggtagacgatttgttcgtccgttccccctaacagtatgacactgccgtcttctgcttctgaagcattgatcatgttttgtccattgcttgtgtcgatttctgacaagtggttcgttttgaaatcgtaaaaagcgagcgatccatcgatgtccaaaatgaccgctggccgctgtttaaaatcaaaaaatacgtaggcactgctgctggcaaccgaatcggtagccaaatcggcaaggctggctttttgtataatggcttgtttctctaagtcaattacataaaaccaaaagcgctcgcccgttggcgtttccgtcattgtttccataatgacggaaacagtattgccttctacataagcgtaagaaatataacctgtttcttcgtcttgaagtccgtcaacagaaatggtcgcttgcatggaatcgcctgtgttgttctcaaggactgtaatcaacatttcctgttgatcctgtgtgaggctaatagcagcaacctggttattttcgtcattcacgtcaatgtaggtatacaaatcatgaacaagtggtcgaaataaagaccgatgttcaaacgcgatgcggtcatagtaagggtcatatcctgcgtcatagcgttcaagccatgacaatggttcgccaaaggcgacagtgtgcccgtctgtttcaaataaaagcgaattgcttgtggaatcttgacttttctgcaagtaaccgcttagctgcactctttctaaatacgattcgtcgccggaaatggtttcccactcaaagggaatcggttcaatgtttaaacgatcggaaatggctacatagaagtaggtgatggtcactgacaaaaacgcaataaatacgaacaacaccatgtagcgtttcgtactaaaatggttcattaggcactcaccttcttccggattaagtaaatgcttagccaggaagacaacacgaccgtcgtcaatcccgttgctacagctatcaatagtgcttctgacgggaatacacgtccatataagtcaccgataaaaaagaaactgttcaaccaaaagacaaaagccaaataaagcgctcctaacaatgctcctttgatacggaaactgcgttcaaggagaatggcggaaaacaaggccgttaaaaaggcaaaacctaggccataagcaaggacgaatacaaatgggtcgaggggaatgagcaagccaaataacctgttcgtttgcatcacttgcgccattgttaacggagcaagaaagagttcactcggcacaactgcttcaatgattttgttgccaattgcggctagtacaatttgcagcgcgactaaaccaagaacgagtagaaatagtaaaaacagcttagctgcaaataattgagcacggttgattggcaacattaacagccgagtgatgacgttgtttttaccgagccagtcacggtaccaaataagcaacgaataaacgagcatgattgcaatcgccatcattatcgaaccaataataggaagttcgctgtacaagtactcccaacgaatcgaataggactcggcaatttgcttaagtgatacgtttgtaattaaagcttcgtttgtgaagtgggcagcctgcgttgaggccaagacataaatcgcaattagctggatcgcggagacaaggccgaaaaggaaaaaatacaccttggacacacgcttccattcaaaatgcagcaacgatagaaatcgcataagtcacctctttttgtgtgtatgtattaagtaattcatacatgagcgtctatgtgtactatatgcttgatacagataaactgtcaagctttttttaacaacgtatgaagcacgttgtttttgcatagattggaacaggattgttttgttttgactgctggctatgaagacaaacgatttgcccaagtgaacaagccagaatttcataggctttttctggattttatcgtacactagagctacagaccattcgtggcagcagaacaaaacatcgtcctcatggaatgaataggagggaggctgtcttgggaggacagcgagaaatcgcgcaaggcagctagcggaatgagcaaagtacacacagatgaaagagaagatatgtttaaaacaaaagaccataacaatgtagcgatttttattgattatgacaatgtgtattggacgctaatgaaccggtacaaccacaaccctaaccacgaagagcaagaaaagaatttatttaattgtttatgggatcggtacgggcaaaaccaagtccgcacgtttcgcgcttatgcggacttccagagaatccgttcaagcttgactgatctccaaaagcagcgcgtccaaatacgccacgtctattcaaacgataaggaaggcgattcccgcaaaaattcgtcggatattgaactttgcatagacgcgattgagagcacttataaagacgagaacatttcctgttatgtatttgtcacagcggatagcgatatggttccgattatgagcaggctgatgtataaagggaaacgtgtagaactttattatttatcagaggcagcgccaaaacatacggatattacaaattactcccattatagcgaggacttgcgtgactttttgcaactagaaatcaaggagtaccatttggaatcctataaactggatgcccttcgttttgtcgaggaatgggaacaacgctttggctcggaaaatgaattgtatttaggggcgccgtggttgagaaaccaattctcgatcaagtttggcattcctgccaattcagcgagtgaactgattgatttattgaaagtagaaaagctgcttggcactgaaaacaaagaattgaagaatggggatattaaaccaagtctagcgttaacagaacaagggcgcagttggcttgcacccttgtcgaaagcgtagtgatgttttaggtggagatttgtcgaatcttaagggttgacttgtagataagtctcaaatattatagggatagacaacagattcgttataattcgctaaaacattaatgcgttagacaaattcgttatgagaggcaaggacataccttgtctctttttgtatgtttttgaccactcctttttaatagggattcgtgctatatgctttgttccccaaattgtaaaatggtaaacctctaaatgcacttattttcattggaggtcactgcatcgtctgttttttcgaatctttctaaataacttcaactgctcctctaaaaattcctgctcttccttatccaaatctttaaaataatagcgctgcgtttgttcattgatacgatctgtttctccggcaagataagaaatggaaacgtgatagatttcggcaagcttttttagcttgcgaagggaaggttcgttccggccttgctcatagaagccgtatgcactttcggtaatgccgagaaaggaagcaacatcttgttgggttaactggtgggcctttcgcaactcgcgcaatcgtttattcagctcgaccataagcatacccttcctgcatgttcgcaataatttactcaactgtttatttaaatttgcactcttttttattgtgtaattctattgacttccaattatttgttgggtaaactgaaactacaacatgttggggagtgatcacattgtgcaaaagggatcaattaatttccttacgaaaaagcagaaactggtctcaacaaaaggtcgttagtctgttgaagagaagatacgacatcatcatcacggaaagttattatggaatgattgaacaagggtctaggcttccgagtttgtatgtggccctcgccatttccgatttgtttaaggctgagccgtctgcgctgtttggtgcccctaagcgcaaacgtgaaatccattcttagggacaattggttcgataaaaggatgcgataatcctctaggtaagcggaaaataatataagaaaagcccgccatgttcgggtggggcgcatcgtttgattgggaggcataaaagcctattttcattgataggatgatagaaagggaacgaaagctgcctctggaaaaagagtaacgctccctcttgggacgatgtgacattcctcctgtcgatggcgcggtgcttgctcgctccgcaaaacagctagcaaaaggacaagaaagccgttttacagtccatttttaacggcttaagggagagggaaggccatggatgaagaacaaaaaagaatgctgggacagttactagtctttggatttcatggaacaacagcgacgccggaaataaaggcgatgatccgtaaccattatgtcggcaacatcattttgtttagtcgtaacattgaaacgcctgaacaattgttgtccttaacgagcgatttacaaaaagcagcaaaggaagctggtcacgagcgcccgttggcgatttgcgtcgaccaagaaaacggaacggtacgccgcctaagtggtgtaacagcgctgccaggagcgatgcttctaggggcaacgcacaaacgccgttatgcctccattgtcgggcagttgacggcgaaagagcttcgcgctgtaggtgttaactggaacttagccccggtggctgatgtgaacaataatccgaacaacccagtgatcggcgtccgttcatttggtgaggacccaagcaaagtcggagattttgcaaaggaaatgatgacggggatgcaggcagagggcgtcattgctacactgaagcattttccaggccacggcgatacggttgttgactcgcaccatgccatgccgaccattccccatggcttaaaacgccttcaacaagtggaacttgtgccttttaaagcgtgtatagaagcaggcgcggaggcgatcatgagcgctcatatccatttcccagcactggagacggagccagttcctgcgacgatctcttataaagtaatgaccgaacttttacggcacgaactaggctattcaggcgtattgatgacagactgcttagaaatggaggcgattgccgggtcgatcggcaccgcccagggtgctgtggccgcattgcttgcaggtgcagatatgcttgtagtctcacattgcgaaagcaggcaacgccctacagtcgctgcgttagaggcggcttttgccgaagggagatttgaccaaaaacggctggacatgtcgtttcagcgcattgatgctttaaaagcaaagtatttgtcttgggatcggctgccccggcgagaggatttgaagaacgtcggatcaacgtttcggcaaagcgaggcaaataccatttatgctgacggggtgaccgcaattggagagcgaaagctatcccctcatcaaccagtgctgctattttatggaaacgttcagcatagaacacctgcagaagaaaggcaggatgaagatcatccacttgtagaggcgctctataaacaagcggcagtggcaaaagcaatcgcatttgacgatgaaagccaaaaatgggagcgctgtttagctgaggcagatctttatgagcaaatcattgtggccacatcgaatattgcccaagcgccctaccagcaacgattcattcacgcattaatggcgaaagggcataagccaattattgtggcgacgcaaaatccttatgactatcgcttcgtgtccaactcgttaacgtttgtggccacctatgagcctacggagccagcagttgtggcagctttagcatacttatttggccgtggcgaggcaaatggccgcttacctgtatcggtaagcgatgacgggaggtgatggcttcgtcatcaatcaatgtaaatatcggttttaagggggaaagcatatgaaaaaatggctgctctatactacagcagcaagtgttttacttgtatcgctagccgcttgcaatagcgcagaaacaggaaatgacggaaacgcaagcaattcaacggacacagtcacagtctggacatacccagtacatgaagagtatgaaagcgaattgaaagagtcaatagccgaatttgaagatgccaatcctgatataaaaatcgagtatgagatcctttcctgggcagaaggagagcaaaagtttgatattgctttaaacacaggcagtccgcctgacttgtatttcggcaaagcactcggaaaatacaaagcaacacagcttttagtagagctggacgatagacttaatattgatttagctgactatgatgctgttgcgctcgatcatatgcggattgaaggttctttgtacggccttcctctctatcagtaccttcatgtatggggcgggaataaagcgctgttagaggaatacggaattgattatgagaaaattcaaaatgaaggctggacatgggatgaattttatgagcttgctgacatcggcgagcaaacgaacgacaatggcgaccgccaatacggatttgtattccaaggcattgacgaggaactgcttgatcatcttgcccgcaacaatggccttccttaccggatgacggaggacggaatcgcttggacagacgagcggattttagaaacgttggagtttattgtcaaacttcgtgaggaaggcatcatgccaaatgaaacggcagcaattgacgcggcgaaacggaatgaaatgttttacaattaccaagcgcttttttatggcagggctatcccttattttgaaccaagtgcagagaaacgcaacgaagatatccgaaacggcgacattgacggcgaggaaatcgaagttgtcttattgcctacgccgcataatgaagggcaagaagaagtagctcgaggcggggcagaaggctatttgttgtttacgcaaaaaggggcaacggaagagcatattgcaaacagcgtcaaagtgctggaacatttagctggagcggatgcgatcgggcaagcgtcttctgcgctcgctttgccgattgtccataaacaagcagccgctgattacgatttgcctctttctgaactgaatgaacgggctgcccaacgtttagcaggcaaagtcttgccgcctaacaacatcaacagtgagctagcggccaaagatgatatgtttaatacgcaagtcgttgtgccgacattccaagcattaatgaatggtgaaacaacgcctgaacaagcgttggaaaaatttaaagcagaggccgaatcagcgcaattcaaaccttaaagcatcaggctgagagagggggactcccccctctcttaaggaaaggaggaacatccatggctacgacgattcagccgccttcgaaatggcgtttgttttttcgtgattacggctggtgctatttgtttattgctgtgccgattctcgtatttttgctgtttacgctcattcccgtcatttacgcatttattatgagctttcaacaataccatgtaatgggatctacctttatcgggttggacaattataaaacgatgcttcatgatgacgtattttggaagtcgatgcgcaatacatttatttttacagttgcgactgtgcctgtgagcgtcgcgatcacattagtgctagctgttttgattttcccacgcggcaaaaaaatgcacaccttttttaaggcatctctttacttgccgacagtcgcttcaggcgtaacgatggcgctcgtatggttttggatttacgacccgacgaatatgggcctcgtgaatatgatactcggcctctttgggattgatccgcagatgtggcttggcagttcaaacactgctttattttccctcattttaatgagctggctgactggtcatggggccggtgtcattttatatttggctgccctcggaggtattcctaaatcgctgtatgaggcggctgacattgaccatgccagtcctttatcgcaattttttaatattacattgccattgcttaagccgacaacgctttatttgctcgtaatgggcatcattacttcattccaagtgttcatgagcatttatttaatgacacaaggcgggccgaactttgcaaccacaacaattgcttatttaatttatgtacatgcatttgaatattaccaatttggccttgcagcagcagaatcgttcgctttagggatcgtcattattgttgcctctgtatttcaattcaagttaatggcaagcgacgtagaattttaactggaggtggttgccatgaaccaaccagcggcaaacagaaaggcgcctcttaaccgcccgcctgaacgaaaggcaatcgccgcaaaaatggtcagttacgcacttttgttgtgttggattgttattacgctgattcccctttattggatgctggtcatgtcttttaaggatacggcagtggcgtcttcctttactcctgaatggttcccgaagaatccatcgattgccacatacgtgcgttttttcacggaaactgatgccgtccgttggctgttgaatagcttgtttgtctcatctgtgttaacagtaaccaatgtgttgttttgctcgttggcaggctatgcgtttgcgaagttgcggtttccgggacggaacacgatcttttggctgctactcggaacgatgatgatcccggcgcaagtaacattgatccctgtttatattattgttgtcaacacgttgcagctaggcaatacatataccgcgatcatgctgccgatgtttgctacagttgggaacatctttttgatgaaacaatacatgtcgactttgccgtcatcgctcattcaagcggcacggattgatggttgcagcgagtggcgtattttttacaaaatcattttgccgatttcaaaaccaggcttagccgtgttggctatttttacgttcgtggcgacatggaatgaatttttttggccatttctagttacacaaacaagttcgatgcggacgattcaaattggcttggctagttttaaatttgccgatgccactgattttggggcaatgatggccggttctgtggtcgcagcgctgccgatgtttctgttgtttttctcgctgcaaaagtattttttgcaaggcattaccattggtgccgtgaaaggataggtggaaaatggcgacgattgtgtttgaccacattaccaaaacatttgtggacgaaaagcgcggcggcacctttacagccgtgaaagacgccacatttacgatcaacgataaagaatttcttgtttttgtcggcccttcaggttgtggcaagacgacatcactgcgaatgattgccggtcttgaaaagcagacagaaggaaacatctatatagacgaccaacttgttaaccacgtccatccgaaagaccgggacattgcgatggtgttccaagattatgcgctttatcctcatatgacgatcaaagaaaatttaagtttcggcttaaagaatatgaaaatcgacaaaagcatcattgacgaaaaggttcgttatgcatcaacgattttagggctcgatgacttgctggaacggaagccaaaggaattgtctggagggcagcggcaacgtgtcgcccttggccgtgcgattgtccgtgatccaaaagtgtttttatttgatgagcccctttccaaccttgacgcgaaactgcgtgtgcaaatgcggattgaattagcggagcttcatcagcgccttggagcgacaattgtctatgttacccatgaccaagtagaggcgatgacattaggtgaacggattgtcgttatgaataaaggcgaaatccaacaaattgcttcgccacaagaactgtacgccaaaccggcgaatatgtttgttggcggctttattggttcgccggcgatgaattttttggatggaaaaatcgtttccggtgagtatctccaagtgggaaacagcaaatggcctctggctccagcattgaaacaaaagatcgctagctatataggcaaagaagttgtctgcggcattcgtccagaacatatccgccttactgaaggcgatggccatgccactgtcacagtgcgcgtatgtgagcatttgggctcggaaaacttagtttacttttctttaaatggcacaaatacgattgcaaaagtatcaggggaatcatttgtccaggccggagaagaagtgaccgtttctctgcaaatcgataaaattcatttgttcgataaaacaagccaacaacgaatagggtgagtctatgttttcagtgacagcgcttttgcgaataacggcaaaggatttgtaccaatccattgtttcggtcgttgctattagtttgttcgtttcgctgatcatgttgccaggtatcttgtttttgccttggcagttggcgattatttttgccttgtttgccggagggccagtttggtttggcgcaagcagagcagttgagacgatgctgcaagaggaaaaaggatcaatgcttttaacgtttttaaaagcaacgaaaacccattgtatccagggaattgcctttgcttgctttttcggcatatttgtgttgattgtcgcttcttcttggtggttatgggtcgtcgaagacacctggtttgcctttgcgattgcctgttttcaaacgtactttgctggcatggttgctttaagccagctttatacggtgccgctcgtcataaaatacggattaaaattgccaaaagcgatgctcgtgagcatgaaactgttgttagcaaaccccctttatacgattgccgcttttctccaactcattttgtttaccgtgctgctgtctatgacgatcgttggccatgcgttcttacttcccggtgtagcggcagtgtttgtaagtagaatgacgagtggagcaattagtcgatctgagttagtggaaaatggggtttttgttcagcggcaacctaattcacactgatgggtatcatgcaacttctctaaactgcaaaaaagtcttcgctatctaaggcgccgtacaactttcattgaatcgaaaagcgaaaatgcaacccatgtattggttgtttgatatatcagtaagaaaacgctttaaaaaaatggtataaaccagcccttttttgtttaagatgctaaaaaggggtgcttgcagatgaaggatcgccatatgcaagacggacggtttgttttaggacttatttggggtacgttgattagcttgccgatttgggttattctcttattcattggttacttgctttttttatagcttgcctatggccatatggctttaggctttttttattgtgtgaaagcgctggcttcattaatatagaaggcagaagaatagggggtgtttaaaataaagccgaaaattagcgatgtggccaaagcggcaggggtttcgccaaccactgtttcacgagtaatgaacaaacgtggctacataagtgaagaaacacgccaaaaagtttatgacgcaatgaaaaagttaaactatatcccaaatgatttagcacgctcgctttacaataaacgctccaatttaattggcttgattgtaccaacaaccgctaacccgttttacggggaactaacagcgcgaattgaacatttttgcgcgctagctggattaaaagtgcttctttgcaatagtttacacaatgcagaaaaagaagcacattactgggaaatgctgcggcgcaatcaagtggatggcgtgatcgtctgtacatacaaccgtggattaatcgacgtgtccgagcaaatgcctacagtcgcatttgaccactatttatcaagtgggatcccagtcattagttccgataattatgcagggggagaactcgcagccgccacgcttatcgaagccggttgtaaaaacattgtccatattaatgggcctgctgaactagagacacctgccaaccttcggcgcaacggttatgaagcagtcatgcaacgatacggtttgcccgctatgacctatgaaattcgcagcgttttatcgcaagcggaagcggaagcagcgatttgtgctttgtttgatcagcaaccacagatggatggtgtctttgcaagtgacgatagcatcgcgttaaaggtcatccaagaagtacgtcgccgaaacaagcgtgttcctgaagacgtgaaagtgatcggatatgatggcacggagtttgttcgtcagcatgtgcctgaactaacaacaatcaagcagccgatgatcacgatggcagagacagcagtgcaaattctcattcagcaaatagaacaaccagagaaggcgcttgaaaaagaatatgtgcatagcattgaattagtaagagggaatagtgtatgaacaaagcaaaggcgaaaaacatcattgccgaacgttcggagatgttttttgccttcttttatgtcaaccggttgacatatgaaaccggttgacataaaatcgtcttgaaagcgcttttcataataaaggaggtgggaaacagatgtctgtcgtacagccatcacgcattaagggcaatcgtgccagattggggcacattcaaccacaaaaacagaagaagttcgtccgtgtgcttcgcagttggcaattgtatgtgttgttggcgccaacgattatttactttcttatatttaagtattaccccatgtatgggttgcaaattgcgtttaaaaattatttgccaagcttaggagtatggggcagtgaatgggtcgggttagaccactttatgcgtttctttcagtcttatcaattttggactattttggaaaacacccttgttttaagcatttatgaacttgccgttgggtttccgctgccaatcttattggcattaatgctgaacatgcttattagccacaaatataaacgatttcttcagacagtcgtgtatgcacctcatttcatctctgtcgttgtattagtgggaattttatttgtttttttatcgccatcaagtggtttaatcaaccatttgattagactgtttggcggcgaaccaatcaattttatggcgagtccagaatggttcaaaacgttatatgtgttctccggcgtttggcaaggaacaggctttgcagcgattatttatttggctgcattgagcggggttgatccatctttgcatgaagcggcggtaatggacggcgccagtaagtttaaacgaatgctgcatattgatataccagcgattatgccgatttccgttatcatgttaattttagcgctaggaaacttgatgaacattgggtttgaaaaggcgctattgatgcaaacaccgctaaataaagaatcatctaatattattgcaacgtatgtgtacgaggtcggcatccagcaagcgcaatatagttttggcacagcagtcgggttatttaatgccatcattaacttgattttgcttgtcacagtcaaccaaattgcgcgaaaaatgtccgacagtagtttatggtaggggggaagatcgaatggacaaatggaaacggacaagaggcgataaggcgtttgatatagtcaatgtcacgttgctgacaattggctgcctgcttgtgttatatccactttactttattgtgattgcctcaataagcgatccaaaccgtgtctttgccggggatgtactccttttgccaaaggatattacgtttgatggttttaagcgtatttttcaagatgacaatattgtcaatggttttaaaaatacacttctatacgcaacacttggtacggcgataagcgtgtcgttgacggtcacctctggatacgccctttcccgtaaagatttgccagggcgccatatcattatgatgtttttggtggttacgttgtttttccatggaggaatgattccaacgtatcttgtcgttcgcgatttaggaatggtgaatacgatttgggcaatggtgattccgaatgcagttgggttatggaatgtcattatttgccgtactttttttcagacatcgattccgaaagacatgctagaagcagcacaaattgatggctgcaatgattttcgtttctttgcaaaaattgttctgccgttgtcaaagccgattattgcagtcatggtgctttttcatgtcgtcactcattggaactctttttttgatgcgttgatttacttgaataatgattcgctttatccgttgcaattaattttacgaaatttgctcatccaaagtgaggcatcgacgcaaatgattggcgacattgaatcgaatcaagtacagcttgctgtagcagaacaaattaaatacggagtcattatcgtttcgtctttaccgttgcttgttttatacccatttttgcaaaaatattttgtaaaaggcgtgatgattggatcgattaaaggctaacaaaagggggaaaacgtgtatgaaaaaacgggccacatgtttgcttgtttctgtcattgctttgtctgcctgcaataatgaatcaagcaaccaggaaaataacaatgctgagaaagtagaatttaatgaaacggggctgcctcttgtcgacgaaggagttgatgtgtctttacagtttgtatcgccaaagtctgccttggcgccaaattttggagaaatgacaatttttaaagaaatagaaaatatgaccaatgttaacattaactggaacaacattcctggagatggctatgctgagaggaagaatttaatgctcgccagcaatgatttgcctgatgctttttacaatgctggttttagtgattatgaccttgtccgctatggccgtgatggcgccattatccctcttgaaggcttaattgaagaatatgcgccgaacttacaaaagattttagatgaacgccctgagctgttggctgttttaacagctccagatggacatatttattcattgccacgagtagaagaaatggggcttgttccctttgccaattttacagcgattaaccaagcgtggcttgatgaagtagggcttgaaaaaccagaaacgttggatgaactgcgtgaggcattaagggctttccgtgagcatgatgtgaatggaagcggcaaagccgatgaaggattgagctttacgccaaatgacggattccaaggctatttaggcgacttttttgcagcctttggcctacctgataacccaaacaaactagttgtaaaggacggggaagtcatttttacagccgttcaaaatgagtataaagaagcgatcgcgtatttccatgaatggtttgcagaagggctgatcgaccaagaagtgtttacccatgacacaggacagtttttggctaaagggaaacaagatcctaaccctttaggcgcctttattttttgggaaattgaatctgttgtcggcttagagcgagctgaggattatgtcttgcttggtccccttgaggggccgaatggggatcggatgtatgggcgttctaaccatcatgaacatcatcgcggtgcctttgtcattacatcggcgaatgaaaatccagaattgacaatgagatgggtcgaccaactatatgacccacacttgtcggcccagattaattggggaccgattggtgacatttatgaggaagacgaaaatggcatgcttgtgaataaagagctgccagaagggatcaccatgggcgaatttcgtgaaaaagtggcgccgatgggcccatctgttgtattagaagaacatttcggcactgtagtagatatggagccgcgggccaaacagcgacttcaagatattgaaacgtattacgccgattttatttgggaagagagttacccaaatgtctttatgaacgaagaagagctagaccggttgcatttcctagaagcggatttaatggatgtcattgagcgaaattatgcccgttggcttatggaaggcggcgtcgaagaggaatgggaagcctatgtaaaccagctgtatgaaatgggcttagaagaatggctgcaaatccgccaagatgcgtatgaccgctactatgaacaaatggagagccaatgagattgtttacaaaaacgctttttttgctggcgtttctgatgataggcacaagttgcacgatgcttgaaacaggaggggaaagaatggcgtcattaagagaggacgcttcttattacacagaacggtataggccacagtaccacttctctacccctgtgggcaatttagctgatccaaatgggctcgtattttataaaggggaataccatttattccatcaaaaaaatggaacgtgggcccatgctgttagcaaggatttgcttcattgggagcacttgccgattgcgttagaacgtgatcatttaggtcaagcgttatccggtagtgtagttgttgatgagaaggatacaagcggtttgtttggcgggaaaccagggttggttgcgatttatacaaacacagaggggggcgaagcccaatcgattgcttacagcaaagacgatggacggacgtgggaacggtatgttggtaaccctgttattccgaacactggcatgaaagatttccgcgacccgaaagtgttttggcatgaggaaacggcaaagtgggtcatggtagtctcaacgaatcagaccgtcagcttttaccattctgacaacttgattgattgggcatttgcgagccagtttggtgccggggaaggattgcatgctgcagtgtgggaatgtcctgatttgttccgccttccagttgacggcgatgaggacaatcaaaagtgggttctccacgttagtgtaggcgataatgatgaaaccaatggctctactgcgcaatattttgtcggtgaatttgatgggactgcctttacaaacgacaatgatgccgcagaagtgctgattactgatataggccaggacttttatgcagcgcaaacatttgcgaatttggatggccggacggtctggctcggctggatggcgaactggcggtatccgtaccaatcgccaaccgatccatggatgggagcgatgtcgattccaagagagttagggttgtatacaaattccaacgggcaagtgcgactacggcaaaagccgatatccgaacttgacacgatttatgccaaacaacaggattttgctccttttgacgttgccaacgaggcaactccgctcgattttaaagggacgacttaccgttttacggccgaagtttcgtgggaagatttgcgagaatttggcttgcggctcaggcatggtaatggtgtcgagtcacttcttggctttgatggagaatatcagaaagtgtttttagatcgtaccaatgcagggctggaaaccataatcgatcgcaatggccaaccatttccgttcggacagcgctatgaggcagattatgatgcaaaacgggggttcatgaagctggatgtgcttgtcgatgaatcatcgatcgaatggtttatcaatgatggtgagcttacgtttacatcccttatttatacggatccaacgaatgcagggattgaatggtatgctgacggcggctccatccatgtccagcatgcacaagcaatccacttgcataatgtgtggcgtgcccgtgtgaccgaggggcagctggagcggattgtgaccaatgaagaaacagttcggttggagattggggaaacaagagagcttatagccgatttgaaaccagattacaacgtgggcgaagaagtgattgagtggggaagcagtgatgaggacatcgtcaccattatcgatgaaacagaacgaggagtgatgattgcagcagttggccaagggagtgccgaagtggttgccagagagcaaaaaaaccgcctcgaaaaaagaatacgggtttattcaacaggagaaggagaacaatagggatgaatcaagtacacggaaataaaagccatagagaacgagtgacgcaagctacaaaaaccgttcaagcaaaccaaaatgaacgtgctgcctatcggcttcgctatcatttaatggcgccttcggggtggatgaatgacccaaatgggctcatttatttcaacggccaataccatgccttttaccaacactacccatatggggaaacatggggcccgatgcattggggccatggaataagcgatgatcttattcattggcaccatttgcccgttgctttagctcctggtgaggcgtatgaccgcgatggctgtttttcaggaagtgcggtagacgaccagggtacgctaacactcatatatacaggccacaatgtcattgatcctgaaaaagatgtcattgtgcaaaaccaaaacattgcccgtagccgtgacggcatccacttttataaagcaaacgctaatccggtgattcaccaacaaccagcagggatggggcaggatttccgcgatccaaaagtgtggcgtgaaaacggtgtttggttcatggttgttggggcgactaaacatgaccaagggcaagtgttgctatatgaatcggctaaccttgaagaatggacataccgaggtgtgcttgcccaaaatgacggtggcaatgaaggctatatgtgggaatgcccggactttttcaagctcggcgataaatatgtgctgcttgcttcaccacaaggcgttgagccagaaggagaccggtatttaaatcatcatcaaacggtttatatggtgggtgattatgtgaatggccaatttatacgaagcagctttacagagcttgattacgggcatgatttttatgccgtgcaaacgttgttggacggcaaaggcaggcggattgccatcggttggatggatatgtgggaatcgccaaagccaagccagaagcatggttgggcaggggcgatgactttgccaagggaattggtgcttactgaagaaggaaaaatagcaatgaaaccaattgaagagttgacgttattgcgccaacaatcgacccctattggcccgcttcacgtcaagcacgtgcaccccatcctttcatcaggcaacctagtcgagcttgaagcccagttcgctcttgttgattcggatgcttctgcttttggcatcagattttgctgtgcggcagatgggagcgaggaaacggtgcttcgatttgacttgttgaagcacacggttacgttggatcgatctcgctcaggggaagggccaggcggagcacggacggtttcaatcaagtctgcggccacaatcgatgttcgcttgtttatcgatcgttcttcggttgaagtgttcattaatgatggagaaacggtaataacgagccgaatttatccgcaagaaacaagcactggcatgaccgtatttgcagaaggagggagcatcgttatgccaacatgcaccgttcacaagctcaagtctatttggagtgaataaaaccggagcagcctccagtaggatggctgctccggctgtcgttgcctcgcattattcatgattcggcgttttcctcgcctacacatctcgtaggccagatgttttctatcagtctgattgctgtttaaagcaatgtctgcgccccgtcaatcacgatttctgcgccgcttatatgtttagcgccgtctgatgctaaataaaggacagtgtcagcaacttgctctggcgtgccaggaggtgtcggaaatggctcgctatttttatggattgtaatcggtttgagtgcttcttcatggcggtatgtccgttcatcgatgtgtgtgcgaatggcgcctgggcaaatgacattgacgcgtatgccatagttggcaagttctagtgcggccatcttggcaaaagcggcaattcctgcttttgaggcgctgtaagcagacataccgaagttggaaaagacacgagtgccgttaaccgaactggtcatcatgatgcttccgccctgttttttcataagtggaatcgcatatttgacgcttaaaaaagtgcctgttaaattgacttgcaccgtttgttcccaatccttcggctcaaacgcttcaatcgaagtgaccgtgccgtttatgccagcattggcaaagacaatatcaatggttttcaccgtttcgccgatttcattaaatacagtctccatccgtttggcgtctgaaatgtcagcctgaaaacaataaacgtgctctttatcaagctccgctttcaacgtttttaacctttgttcgtcttgatcgattaaaacaagcgtggttccttctttggcaaatgccattgctgttgctctgccgatccctgatgctgctccagttatgaccgctgttttttgggacataatgcaccttctttactccaacttttcaggctttaggacgacgatgccacatcgattcctactgccttgttttgccttggacaggcacttatagaattgccgtttttgcatctgcctaaacgtgtattagcggcgtttgcggatcgtaaattggtcattgagcaacagccagttttgcgggaatgacaagccgagcttccagtagctaatgcctcgaagttcgttctgtttaattaggttgaacttcgcctggatggaacggccatcttcaaaccacacttcatgttccctaccgttcgcgtcaatgtagtggaagaaaggggcctgtgcatctgtgtcaaactcaatcgcaacattatgttcacgcgctaatgcaatcgcttgctgggggctaattgcccgggcgtattctccgccaggttcgaacggcaatgtccaatcgtagccatataaattttggccaagcatgattttatctggcgccatttcagttaaagcgtattcgactacttcggtaacaggccctattggcgaaacggcctgagggggtccgcctgagtagccccactcataggtcatgagcacaacaaaatcgacaatgtcaccatgggcccgataatcatgagcttcataccattgccctgtttgggcagcgcttgtttttggggcaagagcagtggagactaacagcccttcttgatggagcctgtcgactgcttttcttagaaaggcattataaggttctctcatggctggaggtaaaaattcaaaatcgaagtggacatcagaaaagcggccaacacgattggcttctgtgataatcgcatcaaggagtgtattttggatgtcaggtgattctagtacagtctggccaagttcgccactaaatgccccttcctgcaagtttgtaatcaccatcattaaagcagtattgttttcgtcggcaatatcaggaagactgcctaagggaacaggcaacagtgcgccttcagcagtgatacggtaactgaacggtgctaagtacgttaagtatggagctgcttcgcgggcagaagtgagcaacgcctcgctaatcgtatcctgtgttggttcaatataggcattcgtttcaatttcctgcttggcggcaggaggcaagtaaagacgaaaaccgacagggagaacttgagttggcataaggttgtttatttcggccaactgttggacagaaaagccatagcgcgcagcaatgacgcttaatgtatcaccaggctggacaaaatagtatcttccgtagatgggaatgacaagcgtctggccgacaacaagttcattaggggcatccagttggttggcagtggcaatcgactggggcgacgtactgtaagcttgggcaatgccatagagcgattcccctgcctgaacgacgtgcaattgcatgaaaaaaaccctctttcctcttgttaatactctatacctatgtggaaagaagggcggacatgaaaaaagcaaagaggcgctacgcgtcctctttgtccctattcttaatggcctcgttaagttgtttcctcacacttgcaatttcctcttctaaagcagttagctgttttactgcttgtgcgacattgccgccagttgtctcaattttttcgacgtcgccttggatgcggacaaaatcgctttttaattcagctagcgtggcttgaagttcatcaacagttttcacagaaacgcctccttttaacgataacgtatcaaaaaagcatcgtgttgtacatggattcacattttataggcgtggttcgctttttgcgttatgataggaagaaaagaggaaggtgaagcgatgaaagctttgcttgtgattgattatacgtatgattttattgccgatgaaggagcattaacggtaggagcgccagggcaagcgattgaagctacgattgtagacaaagtcgaggcgttccaccgggccggtgatttagtcgtctatgccgttgatgtgcacgaacaaaacgatcaatgccacccggaaacagcgctttttccgccccataacatccgtggcacgaaagggcgcgaactgtatggaaaggtcggcactcaatatgagcggataaagggagagggtcatgtcctatggcttgataaaacacgctactctgcttttgtcggaaccaatcttgatttgctattgcgggaaagaggcattacggatgtccatcttgttggcgacgttactgatatttgcgtgcttcatacagccgtttatgcatattcccttggctacaaattaactatttataaagacggcgttgctagtttcgatgaatctggccatgagtgggccttgcgccactttcagcaagcattgggagcaacggttgtgtagaagtccgaataatagcccgctatttacatatagcgggcttaacgtattaagaagtatggtttaaaatatcaacaacgaatttggaccagctttctagccggtcatacatcggctgagcgcttagctcttcaagggtaacccaacgcccggcaagttgatttgtttcccggatggcaacgtctgtatcctcttcgagatcaaggacggagagaatacctaggtggacgcggccgacttcgttggcatcgtcgttaattaagccaatcgtcttcattgctttttgcttgcttgcatcaaaaataagttcttcgtgtaattctcgatgtgtattggcttcaagcatttcaataaagcttgatgacataatggcattcatatggccgccaaagccaatggaaagttgattatgcaagcgggcctcgccgccgccgcttaggcgttcgtaggagtagatttctttcccacgacgaatgacgacataaggaattggctgtttgtaagtggtgtcttcttctgcattgccacggcgcatctcgctgaagtggcggttaaggcggttcataatcgttgcgacttgttcccgttcgctcacaacgccttgaaaagcaagcgtttcgttatggaaaacgtgtttgcgcggtgcgacaacaatcatttcatccatttttcccaacgtagtttccccctgtcgaaaaagcagcaagtgaaaaggcatcgctgctgatcgttgaacatgtacattatcgtacagctaggcatgcaaagcaagaggatttttttaactttgcgaaaagcaaaaaggaagagcaggcgattcatcctgctcttggaaggttatcgacaaggtcgataacccacgattaacgctgctcttgctttgctttttcctctgcttctggaaagaagaaatcctcatcacggaggggttcaaccgttgcttttttgtagccgtttcctttcatcgagaaaaagtcatgtgacttcgtttttgtattcagtccattgaggacgatcgggttgatgtcctcgtcttcaaaataaggatcaaagccaaggttcattaacgctttattggcattgtagcgaatgaatttttttacatcatgggaaagccccacttgatcatacagatcttccgtatagaggagctcatttttatacagttcatctaaaagctcaatcgcaaattggtgcagttccttttgtgtatcaggagattgcttgttgtaaatctcttgtgccagcagcccaatgtatacgccatggattgcttcatcgcgaagaatgaggttaataatttcaccgctttgcatcaactttccttggccatagaaataaagcgggtagtagaaaccgctgtagaacaaaaagctttctaagtagacagaagcgactagtgctttaaaaagagaaatgtcgtcgccgcgtttaatgtctttgtaaatcgagacgattgtattggcctttttttggaggcgggggttgactttgacccattcaaacaaatcattgatttcttctgatgtagcaagcgtcatgaaaatgtttgaataagacttggcatggacggcgttttccatcattgccataaagttcaaaaccgctttgcgttggtggccttggacgtgttctgccacaagaggcatgccagtgtttccttgttcggtgtcgagcaacgtcaagccggcaagcactttcatatacgtgtctttttcggcaggcgtcaaatacttccacgtgagaaggtcgccatttaaggcgacttcctcgggaagccaaaactgtttgacgttttggttataaaacatttgcgtaaaatcatcttcatgcttggaccagttggccgcatcgtagacgtgcgtcattaggcactctcctttttaggttgcatttaaactttgttaaacgacacaagaaaggcagttgtcttgccctgtatcttttgtgcgcgcgtagtaaagggttttgatgcctttatggtgcgcataaaggtcgattcggttcaaatcacgggtcgtcatcgtatcctttaggaaaagcgtaaagctgatcccttgatcgacgtgttgttggatcgttgcaatcatatcaacgactttaaacatatccatgtcataggcttctttgtagaagaaccaattgttcgcattaagcccaggcattggatagtatgttttggagttgccgtatgtccgttcttcaatccgttccatgatcggcatgacgcttgccgtggccgactgtacataagaaatcgaaccagttggcgcgatcgccaatcggtaactatggtaaaggccgtgttctgcaacaaaggcttgcaaagcttgccaatcttcttttgttggcacaaacatgccgtcaaacagcgctttgactttgtcaaatttaggcgtgaagtcattttcgatatactttttaaagtaggagccgtcagcgtacgtgctgccttcataaccgtgatacgtttcaccttggtccctggcaatctcagcagaccgtttaatagagaaatagttcatcgccataaaaaaggtattggcaaaatcacgagcttcttcgctttcgtaagcaatatgctgcttcgctaggtaaccgtgcaaattcattgcgcctaggccgattgatttcatcagtttgttaccgcggcgcacagctggcgcatttgtaatattggttgactctgatacgcgcgttaaagcgtctgtcgccaggctaaccgtgttttcaagcgatttgttttccatcacattcataatgttaatcgacccaaggttgcaggaaatgtcaaggccgatttcatcttcctcgccgtagtcggtgtaagtcgatacttctgaggcttgtaagatttccgaacataagtttgaaaacttgacattactaatatggccatttgcatgggccttgttcacgttatcggcaaacataatgtatgggtagccggattcggaccgcaagatcgccagcttttggaacagacgacgagggttgattttttctttccgtacccgcgggtcgtcaacaagcgtttcgtacatttcttccatgtccatttcatcaaaatgttggccgtaagctttataaacagtatgtggataaaacaagtatgcatctttatcttcgcgcatcaactcaataaacttgtcagggataacgacgccaatcgacaatgttttaacgcgtacgtcttcatcagcagaaattttccgcgtgtcaagaaagtcgttaatgtcagcgtggaaaatatttaagtacgctgcaccagacccttggcgctgccccatttggtcggcatagcgaaacgcattgtcgagaagtttcatgacgccgacaacgccttttgttgcgttagccacgtctttgattgcctcgcctttcgcgcgtagctttgataagttaagggccacaccgccgccaagctttgagagctgcattgaaatgtcgacagctcggctaatgtcatttaatgaatcgttaatttcaagcaagaagcaggaaacgagttcgccgcgccgtttacgtcctgcattgaggaacgtgggcgtcgctggctggaactcttgcgaaatcatggcatttactaacgctttggctttttcaacatccccgtttccgaagaaaagggaaacaatggcgacacggtcttcatatcgctctaaaattttgcttttgtcattcgtttttagcgcgtaatcattgtaaaatttaaaagcgctcatgaacgacgggaaacggaattttttgttataggcaatgtccatcactgctttaatttcgtcgatcgtatacaagcgcagaagctcttcttcgtaataatcattttcaattaagtagtcgatcttttcttcaagatcatggaaaaagacggtgttttggttaatgtagtctacgaaatagctatgtacagcttctttgtccttttcaaactggtagccgccgtcctttgtaatcattagctcgttgttaagctgaacccactttggaacttgtgccaattgaatttaccccctgtaaaaaagcgtcgacgtctctagacgttccgcttagctcgaatttatgaagaacaggaacattgtacatgtttgcgatggtgtctgcgcttcttgcaaagcggtctccccaaatgcggtttccacttgcagctactccttgcagctgctcatggttcttttcaagaaagacgcgtgtcctaggcgagaggtcgccaaaaccagtcgtatacgtaatcaatacgaaaggcttgtccaccgtggtcatgtcgtcaatttgttcaatgtcgtcaaatggcaacttcgccacaaatcgtttgacgtttcccgtttttgaatcaaaaacaattttcaccttcatcacaaccctgtacaaagaatctttttgtgtttgattattgttttgtataccacatatggtagatgataaacgagaattaatcaatatattgatttatccccaacctgtgcacaattagaacagaggcttgtccacgaagggaaacgcttgtgtataacttttaaaaaacatttttttggccaaaaacgaaaggacgttctgttcatgtgaacagaacgtccattatagcgcattttgaaaaaatgaaaagcaaactgcttactcgccaatgaaaaattgactaaaagccgacgcccaaagttcatggccttcacttgtcggtcgcccgctttccacgtatgcggccatttcttcctcggcaggccaagcatcccaatggtccacatacgttacagggagagaaggggcttgttcgtttaacacatcaatttgtccagggtagacggttgctgggccgattgggtttgtcggcacaaggatgatttcaatccctggaatttgttcggaaacagcgtcaataaaagcagaaaggtgggcaattgagtcagatgctacaagattgccattgtcgttaagcgtcagtgattcgagcacaagcacgtcaggctcggatgctgcaatcttttcggcaaacccttcttccagaagctggtcgcttgttgtgtcgcttccgactgaaatcacttcgtaatcgatagcaggcgaagcagcttcatttttaatttgttccatcacaagctctggccagctttttccgttttcgttctcaatggagctagaaccgaaaaagacaatatgcgccgagtcatcgtcttggctgtcaagaaaatcgccaagccatccgccgatttcaattgcctcgctatcaggctccgctttggttgttttctcttggctgtgtgtgtcgacagatgcttgggaaatagcctcttttgcaatcgtattaacgcgattttggtaatgaaagtgggcgatcaccatgccaacaacactaaccactatcagtgctgtaaagactgtgttcttcaatcaatgtcgtcctttctgtatgcttaagtctctatctagtataaaatggctttgccggtaatagaagaaaaaacaacaaaattccctaaaattctatgccagtcatgtaaatggggggaagaatgtttacttctaaggcactttccggtagtattatcaccattgtcaatacatgaatcagggggagaggaaatgggcgagcagacagaacagcgcacgccatttttttccgtattgctcgtcttacgcaacgaagaagcttatattggtcgtctgcttgagcaagtgcttaaccagcaacgcaacggtttcgagatggagctgattgtggtagacggccattcgacggacaatacacgagaaattgtgagctcataccaacagaagcatccgatcattaaattggtcgataacccgaaacaaacgcttccagtcggctggaacttagcgattaaggaagcctcaggggagtacgttcttcggattgatggccatacatcgattcctgatgactttctgctccgctatgcgaaggtgattcgtaaacggcctgatgctgatgtcgtaggcggtatcattgaatctaaaggcgagggcgtccaaggtggcatcaatgaatatgtctattcccatccttttggcgtcggcaactctaaattccgtacattggctagtgaccaagtttgggaaggctttgtcgacacagtgccatatggcgcttataaacgaagtgtatttcaagaagtcggctattttaacgagcaattaaaacgaaacgaagacttggaattccacaaacggatgcgcgccgccggaaaaacgttttttctttcgacaaccatttgttctacttactatgtcagaagcacaataggcggccttatagacaagtcgctaggcgacggcatgtggacgattgttgccaaccgcgtgacgcctggctcccttggaaaccgccacaaagcgccgttatttgcgtttatagccggccttgcactgctggcggcctccttttttcatcccggctttgcgttgttttttgctctatgtgtaattgcctatatcggcgccagtgcctatgcgtcaaccggttttgcgaggaagaaaggttggaaatggttgcttccatgcatgtggacgtttttttgccttcattttttccgaggctatggatcctttaaagctttctttacaaaagcctactggacggcgggccgttaaaagagcgactgccgcccttcattgccaatatgagaaaatatcgagtagctgtggattttcattgaatgttaaggatctgtaaagactttcttatattcgtatgctaaaatgtcgttagacgaaaactacgaaactaggagtcatgcagatgcctactatgatcccaaatcgaatgacccgcggcttaacgatgcttgtcgatttgctgcttattatctcctcatatggcttagccttttcgattttaaggggccagatgacgccaaagaactacgaggcatttggctcagtggctccttggattttgcttattagtgtgctgtttcttggcatttatgaattggaccgtcttgtgcagcatgatatgtgggatctcgtccgtaaattggcgatatctttgacatttattatgctattgacaatgactgtgtcattctttttccgggaatttgcgctgccccgttccgttttgcttctagcccatgtgctcgcttttatcttgttgcttatttggaaaggggcctatacgaaatacagccagctttcgcgaaaagggaaagtcatgtttatcggctcggaggaagagtttgccgaaatggaacatagcttgtcgacattcttatcgaaaagcagctacgttagatggtacgataaacgcgagtcgcttgctcaactgcggacgaagctaatggaatacgatgtcgtctttctcggttcagggctagacgaaggcaagaaggaccgtctcatgttccatgcgatgaaaaagaaaaagcttgtttacgtcgtaccgaaagtgaacgacatgcttttgatgaatacatcggtcacaaccatggacgatacgatggtcatgcaagtaaagccttttacgttaacgttaacgcaactgcttattaaacgggctgttgacattgctgcatcaagtgtgatgctaattgctacgctgccggtcatgctcttaacagcgatcgcgattaagttggaagatggcgggccgattttctttaaacaagagcggctagggaaaaaccatcaaccttttaacattttaaagttccgctcaatggtgatggacgcagaggccaaaacaggacctacgttggctaaatcagatgacgatcggattacgaaaacaggcaagttcatccgtaaaactcggattgatgagctgccgcaactgatcaatgttttgatcggcgacatgtctttagtcggtcctcgcccagaacgggatttctttgcagaaaaattccagcgggagaacaaatggttcaactaccgccacgcggttaaaccaggaattaccggttatgcccaagtgatggggaaatatacgacgaacgttgataaaaagctcaaatttgacttacactatattcgcaactattcgttttggctggactgcattattttaatgcaaacgatcttggttgtcataaataaagcaaagtcagaaggggaagcggcaccgcagaaagcgggtcgtgtataccgcaaaagcgaaaaagtgtccgtgaagtaagccccatttcggccatgtgaaaaactgactatgatgaacgtgatgcgaataagaccatatccccgcgatgatttgtggggatatctgtttgtttgggggaaacaatgcgaaaaaaaatcaaacagcttcctataataaggatgctttccagatttatgtttgcctgttttgcgtgcttgccggccaaaaaaaagcttgttgtgtttgaaagtttttcaggaaagcaatattcatgcaatccacgggcgatttatgaatacatgcgctcccatgacatgccctatgaacttgtctggagcgtcaataaagatcatattggcaagtttgaagcacagcaaattccatatgtacggcggcttagtgtaaaatggttttattatatggcccgtgctggtttttgggtgactaacagccgaatgcccaattgggtgccaaaaccggcccatactacgtatgtacagacttggcacggcacgccgctgaaaaagctagtcggcgatatggaacaggttcgtatgcctggcatatcaaaatcaacgtatataaaaaatttccaaactgaagcaagccattgggattatttgctttcgcctaacccgtattctactgcgatctttagaagagcgtttgcgttcaacaaacaaattttagagacaggttacccacgaaatgatattctgtatcaaggagatctaggcgaagcatcacgccgcttgcggaaaaagtacggcattgcgaacggcaagaatgtgattttgtatgcgccaacatggagagatcaccaacattatgggcttgggtcatataaattcgatttgcaattggacttagatgagctttttgcgcgatttggcaatgatacgatcattttgttgcgcctccattctttcataaaggaacaatttgatttagacgcatacggtgaatttgtaaaagacgtatctgagttccatgatattaacgaactttacttattgtccgatctgttaatcacagattactcatctgtgttttttgattacgccaatacacggaagccaatgatcttttttgtctatgatctagaagagtaccgggatgaagttcgcggcttttattttgacttagaggcggaagcgccggggccggttgtgcggacaacagcagaagtagcagcagcgattgagcaacttagcgccgaaggcatgaaaccatataaggaaaaatacgaagcctttctcgagcggttttgtcacttggaagacggtaatgcggctagcagagttgtaacggaagttttcaaggaggaaggtttttaatggagaataacaaactccccacaacgtggcttgatacaaaagcgatctacgcctaccgtcaacaagcgcaatcctacagtacaaaagaagatctttggtcttggtatgtattgcggcgtctctccatctatgtcacaattgtgtttttaaagtggaaatggacgccaaatgcagtaagctggatgagcgctttctttgtggctttctcgggtttttggctattgcaggctactccagctgcatttattgttgcttttttctgttataacataggctatttgtttgattgcgttgatggtgaaatggcgaggatttccaataacacatcaaagaaaggctactttattgacttgctcatccaaggagcaacgctccctgtgtatttggctatgcctttgtcacttatggtggccttagactatgtgcaattggattcagtcgggcgaggtatcctgtatctgctcatcgttttaatcattatggcgttattcgtacctatcgcctaccagcttacacattcgcaagcgccaaatgcacgtgacccagtcaataaaattcgtacaaaagggcttctatttgaggccgctggcgtgttgttaggtttgccaggtttctttttcgtcttggcgctaattacgttggtgacagggattcagcctacaactgcgcaaagttggtatatcggcggctttttgctcgtgtttgccttaaaagtatgtgcccgttttttcttaacggtgcgaagcttttaattctaccggatttccccaagaaattacaaaatgcttgcctgtaaaatatgctatactgatactattgcaaactaagtgtagaatcgactcgaacgatagaagaaccgctacagtgaccataggaggagagcatcttgaaaaaagtaattacgtacggaacgtttgacttgctccattggggccatattaatttactaaaacgggcgaaagatttaggtgactatttgattgtcgccatttcatctgacgagtttaatgcccttaaacaaaaagaagcgtaccacagttttgaaaaccgcaaaatgatccttgaagcgatccgttatgtagatgaagtcattcctgaaaatacgtgggagcaaaaagtggaagacgtacaaaaatatgatatcgatgtctttgtcatgggagacgattggagaggcaaattcgatttcttaaaagagtattgcgaagtagtttatttgccgcgtactgctggtatttcgacgacaaaaattaagacggaattgctagaggcgaagcaaggataaattcccatttagaatttcatactagaaagggagctccatgctttaatttagattgagtgtggagctcattttttttcgaggaaggtggctttatatatatgtacgaaattagcattgtcacacctgtaagccaacaagacgagaaatacataaaacgttgctatgaaacagtaaaagggcaattacaagcaaacgttgaatggattgtcattttagaaggggattcccccttggctgaacaagttcaattggagaacaaggaaaatccaaatgttgatataaaagttgtagtggacactgaattaaaaaatgttaatgaaaagcgaaataaaggcattgaggtagcaacaggggagtacctctattttttagatgtcgatgattttctgcatgaacacactctatatgtactattggagtcagcaaagtccaatagtgactcttacgatgttatccttggagcaattaaagaaacaaatgtgtccgttcatctaccttcttcctatagcaggatgttgaagcgccttttagacaataggatagcaaagccgaaaacattagcagtaaaaaaataccgtgcttctgctctcaacactctttttaagcgcgaatttattgtggagcatggcatttattttgatgaaaatgtccttggctttagtgatattttgtttacttcacaagcgtataccaaaacgacgaaggccgtcgtgtacgacaaggatgccatttatttaaaattgatccgcaatgatccaattaatgacccgtctattgcgcaagcgttaaatggcattgaatggtatccgcaatcaatggcacaggcaatagcttcattagaggacggccatccgttcaaaaacgttttgcttaaacgttttttaaaggcttaccactataagtatttaaacgggatttataatgaggatccagatgacgtatataagggcatttggtctgacgcatttaaacaaatcgggctagaccaattttcttttagccgctcaatccatcaaaaagaaatccaacttttgtgtgaaggccattataagaaggccgctcgaatggcaaataggcggttgaatttccgtatgttgaaaaagattaaaaagaaaccaggatcatatcggcgggttctttatcaaaaatggtttacaaagaaaatggccatcaagaaagactatattttgtatgagagctttttaggtagaaactattcagatagcccaaaatacatttatgagtatttaaatcgcacctatccgggtaaatacaagcatatatgggtttttaataatccagacagagaagaacctaaaggggtcgtgaaagtaaaacgctttggtttaaaacatttgtactttatggcgagagcgaaattccacgttaataatatgcgtcagcctaaatggtttgttaaacggcctggacaagtatttcttgcaacttggcatggaacccctttaaaaaagttagtatttgatatgaatgaagtacattcagctaacccgaattataaaaaagatttctatctccaatcgagggcgtgggactatcttgtctctgctaaccattattcgactgagatattcaaacgggcgttcatgtttgataacgagatattggaacatggttatccaaggaatgatttgctttacgcagaaaataaagaacaaatcgcagatcagctgaaagcaaaactgcagttgccaaaagacaaaaaaattgtcctttatgcgcctacttggcgtgatgatgaattttacaaaccagggcaatacaaatttaagttacaacttgatctggaaaaattaaaagcaacgcttggtgatgagtatttctttttgatccgcactcattactttatagcggataaattggatttctccggagtagaggattttgtctataatgcttcacagtatgatgatgtgaccgagctttatttgttggcggatgttctaattactgactattcgtctgtcttctttgattatgcaaacttaaaacgaccgattttgttctttacttacgaccttgagaagtaccgagacacgttgagaggtttctacattgacctggaaacagacgtgcctggcccattattgaagacaaccgatgaaattattgctgcattagcaaacttgaacgaaaccaaggagctttataaggaaagaatagaaaaattctatgatcaatattgccacttggatgatggccgtgcctctgaaaaaattgctgaaaaagtcatcgtttccgcaaaataaaggccatctatgaagaggggcagataggagtggggaaaaatgggtatcttcaattttttcgctaaaaaggaagatgaaaaagcgtactacaacaaggtggattactcgatattaaatgaagcagcgcttagaaatggtacgaaggtgtctgtagtagtgcctgtatataatgcgatcgcttacttagagaagacagttgattcgattgttaagcaaacgattgggtttgaaaacataacgtgcattcttgtcgacgatggttcaaatgacggatcaagggaagtgttgaagagttactcagaaacctacaagaacgtcgttagtattttcctggaaacgaacactggtaccccggcgtttccgaggaacttgggaacgcatttggcaaattcgaagtacattatgtatgtagacgcagacgattggcttgcgttagatggcattcaagttttatatgatttgttagaaaagacaaatggaaagtatgccgttggaaagtcgattcaagttgattcaaaaggacaaaatgttattggaagatacgaatcgagtaaagtcaggcacaatgtctcccctttttcgatcaagcatttgttttaccatttagggccaagagcgcggatgatgagtttagatttaatcaaacatcataaaatccgttatccagaaatgaagtttgctgaggacaagcaattttttatagatgtgattttggctgcaggagaaatctcaacaacaaccgagacgatttattatttaaatcgaatcgatgacaacaattcactaacaaaacaaacgaatattggcgagaaaatggattcgaacattaaagttctaaaatacgtattaaacaagaatctggagccagaaaaagaaaaaaacatcgtcaaccgcttaattgaatttgactgcattactaggctttttgaccggaaacactttgtaaaaagcaaagataaacaactgtattatgacaaattccatgaggcaataggcattttcaaaaaggcaaaacgcccttatgaaattagagagacgattattaagcccataaacactatttattttgacttggcaatggcaaaagattatggcacgctagaagcattggcaaaatggtcaaaaaaaggtggagaaacaaaacagattttagagaacggacttccttacaacgttgctgtactggaaaacgggaaagaagtgaaaattcccgttcggttaaaagcggaattggaaacagaaatgcaagacttagaaaaaattcaactgaaaattaaattgactggccattccctgtctccgattgaaggagttgccttaataaacagggcgaatgtggagaacgtctaccagctaccgaatgcagtaaaacagcaagaggatgctgtggtggtttcactgaaaatggaagaattaaacgttcttccaaaaggctcgtacgagtttaccctgatgtatgaggattatgaaaagaaacgagttaaaaaacgaacggaatccacattgaccgctaaacttgataacggcaaaaagtttaatctgtataaaacagtcaacaacaatataggcgttaaagtaaaataaccgagaccaatcaaaatggtataatggcctgccggtaaaggagtttttcgaaatgaaaccaatcaaaaaagcaattattccagcagctggcctaggaacgcgtttcctgccggccacaaaagcaatgccaaaagaaatgttgccaattgtcgacaagccgacgattcaatacattgttgaagaagcgattgagtcaggaattgaagacattattattgttactggaaaaggcaaacgcgcaatcgaagaccactttgaccatgcgtttgaactcgaagaaaaccttgcgaaaaaagaaaagtttgagctccttgaagcggtacaacaagcgggcaaagtcgatattcattacattcgccaaaaagaaccaaaaggacttggtcacgcggtttggtgcgctcgcaaattcattggcaacgagccatttgccgttttgcttggcgatgacattgtccaacacgaaaagccttgcttaaaacagctcattgaacaatatgaggaaaagcaagccagtattattggcgtccagcaagttcctagagaagaaacaaatcggtatggaatcattgaccctgcaaaccaagaagggcgcttgtatggcgttagtcgctttgttgaaaagccaaaagtggaagaggcgccttcgaacttagcgattttaggacgctatttgctaacgccagaaatctttgcccatttagaaaaacaagagactggcgcaggcggagaaattcagcttaccgacgcgattcaaaagttaaacgaggaacaacaagtctatgcctacgattttgaaggcaagcgctacgacgtgggtgaaaaactagggtttgtgttaacaacattagaattcgctatacagcgtgaagagcttaaaccagcgctgattaaaaaaatgaaagagtatctagaactcgaaaacatgctcaaacagtgaacgtgtgtgtaataggaattgccatttgaaagcatggaagcctgtcaacgtacttgttggcaggctttttcagtatgaccaaagacagtgattggaaaaggctctaaattaaagagcgaggcaactatttctagttgcctcgctctctctttttaaggaagcactgcagcgagcgcttcaaccgcaatccagccttcaacgccgttcgcttttacttttacaaaatcagtgccttcctcaagaatctcgatcgtatcatcttcgaaaagttcaaggagttgttcggaatcgctagaggcttcactaaataagagcgtgttttccgtcagttgaattttttggccaactgttgtttgttgctcttccgttgcttctgaaggttcctcgtcttgttctgaagggccttcagcctcttctggtaatgcctcggcttcatcgtctgctacatctgtttcttcttcttgaacaggttcactgttttcgtcagcttcattgttttcagctgtatcgctaactggactttcttggtcttcggaggtaccatcagcatcgccatgttcttcctccgctacctgttctgctagatcttgttcgtctgcgctagcatcagtttcaggctcttgttcgtctgtgttagcgtcagtttcaggctcttgttcgtctgcgctagcgtcagtttcaggctcttgttcatctgtgctagcgtcagtttcaggctcttgttcgtctgtgctagcatcagttttaggctcttgttcgtctgcgctagcatcagtttcaggctcttgttcatctgtgctagcatcagtttcaggctcttgttcgtctgtgttagcgtcagtttcaggctcttgttcgtctgcgctagcgtcagtttcaggctcttgttcgtctgtgctaggatcggtttcaggctcttgaggctcttctaggctgctttcatcagtagagtcattctcttcagaaggagcttcttccgatgctggtaagttgctttcttcgttttcagcgtcgttttccgtgtcagtcgtttcgctagcttgctcattttcatcagctacatggtcgtcttcttcaactgtttggtcatttgcctcgtctgagtgaggaacagtgtcgttctcatcgattgatggctcttctgcatgttcgtctgtgtctcgttctttgtcaggtgaaacgtcttgtttgtcttcttctttttcaacttcatcaataggctgttgtttctctgatggactgttttctaagtcggcaacatcgttttcttcgttcacgctttcgttcgcttcctcgtttgtttccacttctggagcaattggtgcgaaagagaacgtacgtgccatgacttggacagtcggtttggcttctgttagcttgacgtactgggaagagacccagccagtttgtgagccgactttaacataataccagctcccttgtttctttaagatgtctagctgttggccgttgttcaaggttgtgataattttgctcgatgtattcggatcaacgcgaaggtttagacgtgctgtcgttgtccctctgtcgataaccgtctcaactgattctgttttggcttggttgttgctcacgttcaaatagtctgcagaaacccatccagtacggtttcctgctttaacttgataccaaccaccttgctttttaagcaactcgactttttgtcctttagcaagggtagtgatgatgctgtggttagtgcctgctccagaacgcaagttaaggcgtgcagtagtagtggcagagccgttagaaggagcgttgtccacattgccagagccgctgacatttaagtagtcaacagaaacccatccagtacggttgcccgctttaacttggtaccagccaccttgctttttaagcaactcgactttttgccctttagcaagggtagtgatgatgctgtggttagtgcctgctccagaacgcaagttaaggcgtgcagtagtagtggcagagccgttagaaggagcgttgtccacattgccagagccgctgacatttaagtagtcaacagaaacccatccagtacggttgcccgctttaacttggtaccagccaccttgctttttaagcaactcgactttttgccctttagcaagggtagtgataatgctgtggttagtgcctgctccagaacgcaagttaaggcgcgcagtggttgtggcagaaccgctagaaggagtgttgtccacattgccagagccgctgacatttaagtagtcaacagaaacccatccagtacggtttcctgctttaacttggtaccagccaccttgctttttaagcaactcgactttttgtcctttagcaagggtagtgataatgctatggttagtgcctgccccagaacgcaagttaaggcgcgcagtggttgtggcagaaccgctagaaggagcgttgtccacattgccagagccgttgacatttaagtaatcagcagaaacccatccagtacggttgcccgctttaacttggtaccaaccaccttgctttttgagcaattcgactttttgtcctttggtaagagtagtgataatgctatggttagtgcctgccccagaacgcaagttaaggcgtgcagtagttgtggcagagccgagggaaggagattctttgtccactccattgcttgaaattttgacataatcagctgatacccaaccagattggtggccagcgcggacgcggtaccagtttccttcttttttgagtatttcaagcttttgtcctaatgcaagagttgtgagaacgttgctagacgtatttggttggctgcgcaaattaagccttgctgttgtttcaccgtaagaaatcagctcttggtcagaatcttcgacgttgtcttcacttggcttgtcaagtttcaaataatccccagaaacaaaaccagttgtattgtcaacggcgatttgataccaatttccttgttttgctaacagctcaacttttgtatctttatccaaagttgtcacaatggagtggcttgtacctggaccagtccgcacatttaagcgggcagtcgttgtcccaaatgtcccagttgggagttgctccaatttatcgtttccagcgtctcctgttggctggtttttgtatactggaacgtcaaatgtcatttcatagtcgtctacaaggctgtataggttggacatatgatgggtttgcttgacagcccagcctacatctgttgcatattgatatgtaccagggttagctgggttccaacgcattttataaagcgtattttggccgcgggcaaagtagttgctagagacaaaccgtgccccaccaatgatggcgtcttctggtgtaaaccagccttggttgtatgcatattgggcacctgcactgactgcgttcccatcataagcaccaatgccatacatgttgtagaccgttttgccattaacttgcacgccagtagctagctgggatttgccattgcccgtttctaatagtgcgtgtgaaattaagtagatttcatttactccgtaaagcttgcttgcattaataaatgcctgtccttgaccttgtaagattcccttatctgaaaggagttggctgttaattgttccggcgcttagtccagcactggaagacaaattgagaaattgcagataggaagaggttccttgtttaaagttattcgcgttcatataataagccacgtcagagcggcttgcattttcccatctgccatttttatcggtctgcggtcgggcggagaggcccatttgccgatctacaactgcatcaaacgacgaattgtaatgggtttcttttacagtaatggagcttgcataagcagattgcagtggaagcgccgatgcgactaaagcaacaatagacgccgaactgccagcaagcataagtttcttttgaatagggaacacctccaaaaaattgccttctatattagtatcgattcacctgtttcataaattaataggttcaacatattttctcaaattttgtcggataatacaacgccatgcaaaaaaaacgtccatcttcgggaaaaaagacggacgttttttacagttattcggttgggcttgttgtgccagatggactgtttgtatcagttaacgattcactttcgggactggtcgggtctataaagttagctgaacccgggtccgtcagttcaaggtgttgtttaagagtttgctggatttcgagcaagctgtcttcatgaatatcctcataccagatgctattgccataaatatcagggcgacgagtaccagtagtctctaattgcattgtttcaatgccgttaagagacgaagcataaccatggagtgagataatatttgggaacgttaagtccatttgcaagttgtcaccaacggcttgaaagatatcatcaaagcgtgtgatgctagaaaaagaagcagctttatcaatgatggcttcaacgacttgttgctggcggatgccacggcctttatcgccgccgccagctgcggattttcgctcacgtgcataagcgagtgcttgctcgccgtttaaatgggctggccctttacgaaattcaaaattaacaccgcggcttttttcttcaaagtcaatgtcgtatgtgagttcaaggtcaatgccgcctaaagcatcgacaacatctacaagaccgtcaaaacggatgagtgcgtaatggtcaatcggtatatctagcagttcctcaacggtgtcaatcgccatgtcaataccaccaaatgcgtgggcatgtgtgattttatctttaaagccgccgcctcgatagccgacaatttcgacataagtgtcacgtggaatgctcgttaggataatcgatctctcgcttttgttaaaagttgctaccatgacggagtccgttcgttcggcgccatcgccttcacggtagtcacttcctaaaagcagcatcgaaaaattgtccttaccaacatccactggctcaatccgcctctcagatttattgcctcggtccaagccttggtaagacccggccgctgtatcgcttaaatggttaataatataccaaacgccactgcctaatgcgagcaaggcgacaatggctgcaattaaagttgtctttaaaataaattttgtccgtcttttttttcggcgacgttttcttgaatcttcaaccatacgtcaatccctcatttcagtataagtaggttccaataaagtgggaaccatagcataaatcgacaaagtgcgcatttcaaaatcaaattatatcataatttcggataaaagatagaggatgaaccgtgaaaaatcgtgttatatcttcttacaatgttctttgaaaggaaaggacttgcgttcatagtatagaatggttgtcaggatgaaaacaaccaataaatagaaaataggcattagaagttgggaaaaatcgttcaaatggcggatgaagactagacaattgttttaatattctagtataaatagcactgataacaatgtaacagttaaacgaattaataaagagagtttaatcgcaataaacaaacggattttacacaattatcccgttgtttttgataattttactgcttatttcacgagaaaaggttttttttgaaacttattattgatttctgaaaataattcttttatactagtactataatttttacgaaattagtatcagatttcgcttttttctgctaatttcgtaccgcagttgggcaaatccaattgggaaaataagtgagtgatgatatgggaaagctagataaactcgatttcttgattctagaatatttccaacaagatggcaagtgtacgtacagccaaatcgcccgcaagcttggtgtcagcgaggggacagtccgaaaaagggccacaaaaatgcgaaaagacggcgtatttgattttatgattcgcattaatcctgtaaaggtcggctattccgtaaaagcgtttatcggcattcattcgcagttgggaaaacaacatgaaataggacaatggctaaagacgtttcctcaagtgatttatattgcatcttattcgggctatcatgatttaatcctgcaagcgtattttgaaaataatgaagcgcttgtccattttgtcaatacagagctcacgccagaaaacggaattgaaggaattgatgtcagcatccaactaaaacagtacaaagattcaatttcttatctattgtcgtaactcaatcgaaaatgaaacacagtgaggtgagcgatatggcagaagacaaaaagctacttagaattgaacatctaacgacttcttttcgaataaacgatcaatattatgcagctgttgacaatgtttcactcgatgtcaacaaaaatgaaattttagccattgtcggcgagtcgggttcagggaaaagcgctttggcgttttcgattgtcggtctgcatgacaagctaaacacaaaaattgaaggcgaaataaattacaaggacaataatataactaatttgcctgaaagaaagcttaataaattgagaggaaaagaaatggggatgatttttcaagaccctttaacagccttaaaccctctcatgactatcggcaatcaaattgatgaatcgttagaactacatacaaagttaaataaaccaaatcgaagaaaaaaagttttggaccttttacaacaagtgggcattcctaatcctgaagtaacgtataatcaatatccacatgagctttcaggaggaatgaggcaaagagtcgtcattgctatagcgatttcatgcgatcccgaatttttgatagcagatgaaccaacaactgcgctagatgtcaccatacaatcacaaatattagacttattgaagaagttaaaaagcgaaaccaatagtggcattattttgattacacacgatttaggtgttgtcgcagagatggcagatcgagtggctgttatgtatgcaggtcaaattgtagaacttgcgccagtggttgaactatttaaaaacccgcttcatccttatacacgttctttattgcaatcaaatccttcggtaaacgaagtgaaaacgaaactgcatgtcatacaggggattgtcccttcgctagataaacttcctcggcaagggtgcagatttaaggatcggattccttggctcgctgagagcgcccatgatgaagacccagttcttcaagaagtgaagcctggacattttgttcggtgctcttgctataaacatttcgagtttccaaatagcagtgaggaggcagcaagagatggcgttattggaagttaaggatttaaaagttcactttcctgtgaaagcggggatactaaaacggactgtaggccatgtaaaagcggtagatgggatttcgtttgaacttgaatcgggaaaaacgtatgggcttgttggagaatcggggtcaggaaaaacaacgtcggggcgagctatcatcggcttaaatgatattacttcaggaaaggtcatttttaatgggcacgatattacattaggaagaaaagcaaaattagatttccgtaaagatattcaaatgatttttcaagatccatattcttctctgaaccctaaaaagcgagtattagacattattgcagaaccgttgcggaattttcgaaaaatgacaaaagctgaggagcaaaaaaacgtcgaagagttgctggaaaaagtgggattaagtcgtgaaagtatcgttaaatatcctcacgagttttctggtggccaacggcagcgaatcgggatagctagagcgattgcgttgaagcctaaattagttatagcggacgagcctgtttcggcgttagatgtttcggttcaagcccaagtgttgaattttatggctgatatccaaaaagagttaaatttaacctatttgtttattagccatgatttaggaattgtccgccatttttgtgaccgaatcggaattatgtatcgagggcgttttgtagaggagggtacgagggaggatatttttgaaaaccctcaacatatttatacgaaacgtttaatatcggcaataccggacattaatcccgaaaatcggaataaaacggcggaaatgcgacaaaaagtgaaagaacaatacgaaaaagggacaacacacttttttacaaaggaaggcaaagtctttgatttgcaagcaatatcgaaaacccatttagtcgcgcttcctgggaagggtgaataattatgtggaaatttattgttcgaagaatacttgtctccatcccgcaaatttttgtgctaagtatactcgtctttataatggctcaatttatgccaggtgatgcgttaacggggttaattaacgatccggatattacaccagaggcgatgcaggctcaaagggaaaagcttggtcttgataatccttggtacatccaatataaagattggattgtaaatgcggtgcaaggagacttaggaaaatctttttctcataaaataccagttactgaattaattgatcaaagaatgtggaatacgatttggctagcatttctttctctagtattcatctatgcgattgcggttccgttaggcattctaagcggtcgatataacgatacattacttgataaaaccattactggttacacatatgtaggttttgcagcacccacgtttatttttggtctagtaatggtattcttcttcggcttcaagctacagtggtttccgactggcggaagcgtggcacctggattggagccaggtacgtgggagtatgtggttagtaagttccaacacttattgttaccggcattgtctattgctttaattggcactgtttctactgttcaataccttcggagtgagattattgatacgaaacaaaaagactttataaaactagcccgatctaaaggggtctatgagtcgagaatatacaataaacatattttcagaaattcattgcttccagtagccgcgttaattggttttgaagtttctagcttagtaacaggttccatttttattgaagcgatttttaactacccagggataggccaactcttctttcagtcgatcttaatacgtgattacagtgttgtaaccgcattagtcctattgttcggtgtcatcatgatccttggtgccctgttatcagacatcataatgagcataattgatccaagaatccgtattaagtgatggatgagaggagttaagcaaatggaaaatacaccattagtaagtacccatcaaaagaaaacgccgtctggaatgcgtattttatggaaagaaattgttcgcgacaaaatcgcgctcatttcattctttctagttatgattgtcgctttggctgtgtttggtatatcccttgtgcttgatcaatctgaaattgtaaaagttgatttatttgctatttatgaaccaccatcttctcaattttggttaggtaccgattatggggggcgcgatgtatttggtcaattgatcatcggtacgcgaaactcgttagcgatcggtattttagtcacactgataagcggtgtcattggcatactgagtggcctagttgctggctattttggcgggcaaacagacaatgtgttaatgcgcattgttgactttttcatggtgttgcctaacttgatgattattattgtctttgttgcattagtgccttcatataacgtgtggagtttctctttaatcatgtctgctttcttgtgggtttcaattgcaaggttaattcgggcaaaagcactgcaagagtcttctcttgattatgttcaggcagctaaaacactaggtaccccacattggaaaattatgtttggccacgtgcttcctaatttaagttctttgatcattgtcactatgacattaaacttagctgcaaatattggcttggaatctgggctttcgtttttaggatttggatttcccgaaagtacaccaagtttaggtacattagttgcttatgcgagaaatccgcaggtacttgagttaaggccatggatctgggtaccggcagcaatactaatttttgtgttgatgctgtgcataaataatgtcggtcaagcattaaaacgcgcgactgatgccaaacaacgaagaggctaaaaaagggaggaagaaaaagtgaaaaaatatttacgctttggcaaggttcagtcagtggcaattgcttctctgctactattggctgcatgtggtggggatgacacgagttcagaaggaggcaataattcttcaagcaacaacgatggcaatggaagttctgaacaagcaggcgatatcttttcaattgaagattttaatcatgaaatacgggcagatggcgaagaaatcattgacgggggcaccctgaatgttgctttagtgacagacacgccgtttgaaggaacgttaaacagaaacttttatcaaggtgtgtttgatggagacattttatattggactgaagaaccgctattagactatgacgaagattaccaatacacgcaaacaggggcggctacgtttgagatagatgatgacggcaggacatttacatttacgattcgcgatgaagtgaattggtcagacggcgaacctgtaaaagcggaagactgggcatttacgtttgaagtgctcggccatccagactatccaggggttcgattcacagaagcttcaaatgtggaaggttttgatgaataccgcgcaggcgaagccgattcgatttctggacttgaaatcattgacgataaaacgttaaaaattacgttcaaggaagcaagcccgtctttgttagcaagcgggatctggacatacgcgatgcctaagcatatctttgaagacattgaagtggcggatatggaatcttctccagcagtccgtgaaaatcccgttttctttggcccatatgttattgatagcattacccctggggaaaatgttgtgatgaagaaaaacgagaactattggcgtggtgaaccaaatgtcgatgaagttgtgctcaagactgtaaacccaaacgtgttgaaccaagcattgcaaaatggcgaagttgacattgcgacataccaaacagaccaatacgctgacaactatgaatcattaacaaacgttgattttattgggaaaatagacttagcttatacgtatattggtttccaaatgggtacatgggatgaagaagaaaataaaaacgttatggatcctgacaaacaagtgtctgacgtcaacttgcgtaaagccatggctcatgccgttgacaacaatgcagttggcgaacgtttttacaatggatttagatgggccggtacgacattgataccgccatcgcacccaactttccataacgacgagctagaaggttttgcatacgacgtagagcttgcaaaccaaattttagatgacgctggttatgaagatgttgatggtgatggactccgtgaagatccaaacggggaaaagttgcaattaaactttgcgtctatgagcggtggcgatacagctgaaccacttgctcagtactatattacccaatggaaaaacattggcattgacgtccaacttttagacggacggttacaagaattcaatacgttctatgaccgcttaaaagcatccgaccaagacattgatgtttatcaaggtgcttggggcgtaggatccgatgccgatccatatggcctttggggtagcacagccgcctttaactatactcgctggaccaatgaagagagcgaccgcttgttaaaagaagggacatcagaagcagcgcttgacatggaataccgccaagaagtttataacgaatggcaagaactaatgcttgaagaagtccctgcgtttccgacgctctaccgttcagaattgcatgcggtgaacaaacgagtcgttaactattctgagcttcctggatctgaatttttcaatgaccgctcacaaatcggcttaacagctgaagaacctgaaacagcaaactagagaaaaaagtgtttataaagcactgaatgcagtagcctgttacttggcccggtctatcgggtaagtagcaggctttttaaatgtaaatggaaaacaattctctaagaaagtcagtcaactagcatctatattaagagaaactcgcattcactatgccaacagtttttttgttctcttaaaatgtagaaaagaggattttcccaactttttaaacgtagaaaaaggtggaatgggttttcgaaacgagctatagcgcctattcctcaagagatttcccaactgtccttaagtaactgctctgttcacggttatgatataataatacaactaatgttagactagtagaaaacgcttgcaagagtatttgtctacggtctgaatgaatgtttatgtgtgatggaggacatagcaatgaacacaatccttgtttctggatttgaagcgtttttaacacatcaaaaaaatccaacggaagcacttgtacaaaagttggatggaaccgagatggacggcaccttaataaaagggattgtgctgcctgtttcgtttgctcgagctgcggaattgttgattgaacacgcaacggcgatccgccctaatgcgattgttatgcttgggctgggcgcaggtcgaaaacaggtgacaccagagcggattgctattaatgtgatggatggaccgccagataatgaaggagctgtgatgaccgatcaaccgatcaagcaagatggtcctgctgcttacttttcgacgcttcctattcgtaaaatagtcaatgaattaaatcgtcatggatgtccggcaaccatttccaatactgccgggacgtatgtatgcaatgatctgatgtaccgcgttttggaccatttgcagacggcggctgtaccagcaggctttatccatgttccttatacggatgacatggtcggggttgaggaagtatcgttgccgggggacacggtagaaaaggggataggccaagcgttgcgtgtggtagcaagtacgctttagccaacatccttttctaaataaacgagttcaccttcggaaaattttgcctgtccgttcgtctgttccgtcatccattgctggaacgtctcagtttctgcttccttgacgtatgtccggatgacaacgttatcaaggtagtcgattccttgcaacaaataaggcgattggcggatttcgttttcaattttccctagccaagtgtaatcaatggttgtatggacgaggcgcatgagcgtccgttcgacgatgccaactgcatttaagccttcactaacggcaccgccataggcgcggatcaggccgcctgcgccaagcttaataccgccaaaatacctagtcacaacgaccgctgtgtctttaaggttccgcttttttagtacttcaagcataggaacgccagcggtgccgcttggttctccatcatcatttgctttttggattaaattatgttcgccgatcaagtaagccgaacagttatgcgttgcctgccaatgctgttttttgatgctttcgatgaaagcgatcgctttttcttcggtttcagcccggctaaaatgggcaataaagcgtgatttttggataatgatttcatgttctcccccttgtttgactgtataatagtttggcagcataacggtcctccattaacaagatgtttattttcacagttttacatattcgcgaaacgacggtgtaacacatgtctgttactataatcggtattctcaggtcctattaaaaaaggaggagaggtttcgctatgaatagtcttacggtaggacaaaaatcgtgtaagataaggatagcggaaagcgaattaaaaataaaggcattacacatgctacagttttttgactagttccgtaagtgattgaaaaagcgaggagtattcatgacagacgtaacgatgcttgatcatataattacgcaaacgcttgactcagttgggacgagtcgcgaaaaaatctttgaaatcggtgaacgctcccgcaatgagtatgaatacttgaaaaaggaattagatcaagtcaaagttaaattaacacacgttattaatgatgtcgacgaaaccgtgttaaaaacaaaacacgcacgaaaccggttagccaaagtaagcaaagaattcaatcggtacacaagtgaggaagtccgtacagcgtacgaacaagccagcgatttccaagtacagctggccgtgcttcaacaagaagagatccaattgcggattaggcgggatgatattgatcgccgcttaaaaaatcttcaggatacgatcaatcgggctgaacagctttctgtacagatgtctgtggtgtttgactttttatcaagtgacctaaagcaagtcggcgaatacattaaagacgccaatgaaaagcaagcgttcggtttaaaaattatcgaggcacaggaagaagagcgtcgccgtctttcccgggaaatccatgacgggccagctcaaatgatggcaaacgttatgcttcattcagaattgattgaacggatttaccaggaacggggcattgaggaagcactcaaagaaattcgcgggttgcgccgtatggttcgttcttcattggcagaggtaagaagaatcatttatgatttgcgtccgatggcgttggatgatttagggctagtccctacattgagaaagtatttggagaatattgaagagcgtcatggcttaaaagtcacttttaaacactttggcgttgaaaagcggcttgcccaacaatttgaaattgcgttatttcgccttgtgcaggaagcggtgcaaaatgcgacgaagcatgcagaaccgactgaaatcatcgtgaagattgaattgaaacctaaaaacgtaacgcttgtcattagagatgacggcaaaggatttgacctttcagaaagaaaggaatcttcgtttgggttaataggcatgaaagaaagggttaacatgctaaatggcaaaatgacgattcattccaaaccgcaagaaggaacaaatattttgattcaacttcctgtttctacttaattaacgtcaatccttcctatttaattacgatagttctgcgcataaaaaagcaagatggttaaagaaacatatacggctgtaaaaattgtcgattacagctttaaaaaatcacaaataatagtatgtttggtagagaggtgaaaacaatgattactcaagaaacacaagaaattcgcattgtcattatagacgaccatccattgtttaaagaaggagtaaaacggattttatcaatggaggaaaattttaatgttgtggcagatggggaagacggatcggaagtaatcgatttggttcgccaacatcagccagatgtcattttaatggatattaatatgccaaaaacgaatggcgtcgaagcaacaaaagacttgatcaaggcatttccaaaagtgaaagtaattattctttcaattcatgatgatgagtcttatgtttcccatgtattacgaacaggagcctcaggttacttattaaaagaaatggatgcggaatcattggttgaagctgtaaaagtagtggcatccggcggcgcttatattcatccaaaagtgacgtcaaatttaattaaagaataccgccgccttgctcgccaagatgaacaataccaagactcgatcgggttccgtgaagtcgagtataggaagccgcttcatattttaactaggagagagtgtgaagtgcttcagcttatgacggatgggcaaaacaaccgggcaatcggcgagtcgctttacataagcgagaagacagtgaaaaaccatgttagcaacattttgcaaaaaatgaacgtgaatgaccgaacgcaagcagtggtagagtccataaaaaaaggatatgtcatcgttcgctaaatagggacactatttctcgggaaatggtcgttccgaggcagcgaatggtgagtcgttgcctcagaatgaacgatggagaaatggactcgccggaaaagtgaggaatgaaaatgggaaaaacggctgttctaacagactcgacagcttacttggataaacaaacattggaagaactcggcatttacacgattcctctttcggtcatttttagcggcaagaactaccgggaagaaatagatctgtcgacagctgcgttttatgaaaagctttctaccgaggaagcactgccaacaacgtcgcagcctgcgattggcatgtttacggagctgctgcaggaacttaaagaggaaggatatacggatgtcgtttccgtgcacttatcgaccaaaattagcggcacgttccaaaccgcactctcagctggagaaatggtcgagggcattacactccacggcgttgactcagaaattagttgtgccccacaagggtttcttgcccgaacagctgctaaattggctttagaaggtacacctccagaaaacatcgttactgagcttgaaaaaataaaagcgcaaattagggcgtattttgttgttcatgacttgcaccatttgcgccggggtggacgcttaaacagcgctcaagcgcttatcggcagcatgctgcaaatcaaaccgatccttcatatggaagaggggctcattgtcccatatgcaaaagtaagaacggagaaaaaagcgattaaccatattcttgatatgttgtttgatgatttggctgctggtaacgtgaacgaagtatcggttattcatgctaataatcgcgcaaaggctatgcaattaaaagaaaaaattgccgagcaacatccgagtactacgattcaaatcagttatttcggacctgtaattggtacccatttaggaagtggaagcttaggtgttagctggtattagctggcacccttcctccataaaggagtggattgtttggaaaggaagcaactcgaagccgttcggcaatgcctcaacggcagaaggctgctgctgtcagaacttccttttgatcgtgagtggatcgattattgcctaaaaaaccactatatctcctctgaacccgcactctttcaatcgccatcgggctggcactgccgccgctgtggcgctaccgctagccatttgttctcctctcatttttgccacatttgccaacgtgactgtatgtattgccgccactgtttgaaaatcgggaaagtagctagttgtcattctttgtttacttggatcaaagacgagttcttttatccggcaaaggaaaatgcttgtgtgtggagcggccaattgtcagcgcttcaacaacaggcagctgccgttctcaaacatgccgtggaaaccgaaacatgcaccgcccttgtatgggccgtttgcggagctggaaaaacagaactgttgtatcctgctttagatgactgctttcgcttaggaaaaagagtggccattgctgctccccgaacagatgtcatcaaagaactagaaccgcgtttaaaagaatcgttcccaagcattgaaacgagcgtgctttatggtggcaggcgcaaacaagcgattcaagcgcagctcgtcttagcgacaacgcaccaactcatgcgttattatcaaacatttgatgtgttagttgtcgatgaagtcgatgcctttccctattcttacgatgccagcctccaatacgccgttcagcaagcaaaaaagccaaacgcgactacgattttgttaagtgcgacaccctcttcctctttgttgcgtaagaaagacttgctgatcgccaaaattcctaaacgttttcataaccaccccttgcctgttccgcggactgagtggatcggcaactggcgttctgcccttaagcgcaagcgcattccagcgattgttacgaagtggcttacgaaatatgaccagtacccaaaaatgatttttctcccctctatcgaaacactgcaaactttttccgaattgctagcagaaagaaaaatagaccatgctgctgtttatgcagaagcggctaacaggcatgccgatattgccgcctttcgtaagaaaaaacacaacttgctattaactacgacgattttagaacgaggcgttacggttgaaaatgtccaagttgctgtacttgggtcagaagaccgaatttttacggctgcctgtttaacgcaaattagtggacgtgtaggacgaaaggctcgttttccttcaggcgatattgttttttggcattatggacgaacgaaagcgatgttacaagccattcagcacattaagcaaatgaataaggaggcgtttgcgtgaaccattgtcttctatgcgggagcacctattgggaaaggttgtcgctggcgaggttggttgttgccgaacgagaacacctatgtggaaattgtgcaaggaagcttgaaccagtcaaatccggttgtagaaaatgcggcaaatggtgtggaggcagcgaacaaaattgttgcttggattgcaagttatggagagcgaaacatgaagatgacccgcttgttcgtaattgttctctttactattataatccctttctaaaagagttactgtcggcttacaagtatcgcggggatgctgctttggcgcaaatgttcgccagtcagctaaaacaaacgatacgccgcgagtttcgttgccattcattaacgtatgtaccgctcagtgcagaccgtttgcaagagaggggctttaatcagtcggaattgctgttgacggtaagtgggctccctgcatcatctgtattagcacgggtcgaccaagcagcagcaaaacagagtaaaaagacccgtgaaaatcgaatcaaatcttataaaaagaatcctttttgcgttttaagccgtaaaacaagcgatattgccggtaaagattttctagttgtagacgatatatatactacaggcacgactgtacggcaagcggccgcgattttgctagcacacggcgccaagtccgtttcttcattaacggtagcacgggcgaaataagcaggcaaagtcggtgcaagctttgctaaaatagacttaaactggttttaaaattatcgtagcaatcaagtacaaatgaaattgattcaggtaggggaagaagatggctgaattagcaaattgtcaaaaatgcggcgcagtttttgtgaagaacattcattcgatttgccgctcttgctatgaagaggaagagcgctgttttcaaaaagtgaaccagtttttgcggaaacgggaaaatcggtctgcgacaaaacaagaagtcgtagatgggactggggtaagctatgatatggtgcagacgctcatccgaaaaggacgcttgcagcttcgccatttcccgaatttatataatatatgcgagcgatgcaaacaacgaacgaaggaaccgtggatttgccactcctgcagagaagaaatgaagcgggatttggcaaatagcgaacaacaatcaaagccagcgaagcgcatcgatggggagcaaagatcctcttatcgattgcaagaaacgcttcataaaaaaaatgagtagcaaaggtggcggtaacatgaaaatcaattcttctcaatcgatggttccccacgccgtttataaagcaacaatggcaaaggtgacaccggaagagcatcaactagctaaaaaggaccaagttgaaatctcatctgatgctcgaaagctaaatgaggaaattgcagctgctaaagaacaacgaattcaagagctaaaaacacaaatcgaaaacggcacctacgaacttgaccctgaaaaaacggcagaagccattttacggtcatggacaaaaggcggaaaataatggaacaatcagcaaagaaatcgcttgaaaacttgttacatgtccaaaaagagctgcttgcaagcgcacaaaaaaagcggcaagcgctgattcaaaatcaagtggagcagctggcgcagctaacgggaacagagagttcgcttatatctaaaagtcgtttgttggaaaaagcgctcgctgaagcgttaaacggaaaaacattgtctgaaatggccatacaagacgaggagtgccgagtcttgcaaacgcaattaacagaagttgtccaacagttaaaagccgagaatgaacaaaaccaaaaactattgatggattcgatcgctttcgtccaaggaacgttgcaggttatgcagccgaagggcgatgctacaacttacacaaaagatgctgtggcgacaggaaaaacgaaagcggtgttcgattcaaaagcgtaaaggagaagttatgtctacattttttggaatggaaacgatgcgtagggcagtcaacacaaatcaaactgccatacaaacagtaggaaacaatgtggccaatgccaaaacgcctggctatacaaggcaacgtgtcaatttgcaagcgacaggaggctatccagcaacgggtgtttggacccagccagctatgaatggaagaattggttcaggggtacaagtgacaggcatcgaacggatacgtgaccaattgttagaccgccaataccgcgctgaagcacatgttgaaggtgcagctttcattcaatataaaatattagaacgtatggaaggtctttacaatgaagcaccttcagatacgactacaagcaggctatcagatcaattcgattctttttggaatggttggaaagaactagcttcagggaaagaaagccaagcggttttgctcgaacaagggaaagctgtcacggatgcgttcacgcatttgcagcgctcttttcaaacggaaatgaacatgttggagacggaagcagaattaacgactgcgaaagtcaaccaaatccttgaacaactccatgaaacgaacaaagacatcagagctgctgaatcctcgggacaagttccgaatgaattgtatgatgcccaagacaaattgcttgaccaactttcaagccttgtgcccattcaagtaagccgttcccctaaccctcaagaacatgcggcagctggcgctgaagggccttataaagtagagctcaaactgggtggaagcgaaacgatcacgttagtcgatgcgacggaggaagcgccgcaattgttgacgctccaagagggaatgcaatggactgtcggtgacagcaatcagccgtttacatataacggtgctggcggtggtgagttggtcggattgcaaaaagcccatgagcgagtcggtcaagaacttgaagagataaaagcgttggcccaaacattcgcgaaagaagtaaaccagatctatgcgtttgcctattctgaacagggtggattcgggcaagaattctttactattcacctcgatgacgcaggcgcgttctctcacatcagtgtcaacagtgaactaagcaacaatccaaaagcattggcaacagcaagatttaatgaagaaggaattaaacctgaatacaaagacgaatttgcggaaaaatgggctgcttgggaaaacgacaaagacaatgaagaggcgtttcgtgatttgctagcatttttaaatgaggcggaccactttgttggtgggaaaatgatcgttgagggagatgtcgatgtcgcaaaagaaattagccgtcttgaggattctgctgccattatgggcaaataccgggatatgatgggcaagctcggagtggaaacaaaatcgcagcgtgatcaaacagaggcctctaacgctcgccttgccaatacggaatcaaatcgaatgtccattagcggtgtttcccttgatgaagaaatgacgctattgatccagtttcagcatgcttataatgctgctgctaggacaatgacggcgatggacgaaatgctggaccagatcattaatcgattaggcgtcgttgggcgttaaaaggaggagttttatatgcgtgtaacacaaggcatgatgatgacgaactcgcttcgttattcccaaagtagttatcaacggctttctactttatatgaccaaataagtgcgcaaaagaaaattacccgcttttcccaagaccccgttgtggcagcgaaaagcatgcagcaccgtcaatcactcgcacaaatggaacaatacaagcgaaatgtcaatgaagctcaaagttggctaaaccaaggggatacctccttaaaggaagtatccagcattttaaaacgtgtacgagaacttgccattactggctctactgatgggtatggcgaggaagaacgcaaaaacatcgctcatgaactagaagaattgcgtaaccatttgattacagtagcaaattcaaatgtcaacggcaaatatatttttaatggcagtgacacagacaacacaccagtccaagaattatcaccgtcgaaactaaatggtgaaaaacttgataacgtaaaaattacatatggtggtcaaatctatgattatgatgccgatgcaggccattttgttgcccgcggcggggaagatacgcttgtcctcaatggggagaacatcgaaacgggcactggagacgtagtcgctgaaaaagacatgttgattatgaggatatcgacaaatcaaaaagacgtttcttttgaactgcaaaaaggcgttgaaatccaagtcaatacggatgcgcgaaagctgttttcagacgagctttacagcgacttttttatgtttgaacaagcattgcttgatccagaaacgtcagctgaagatcttggagaatttattagtaaaattgatgcccatttgcgcaatgccgcagatgttcacggccaactcggtgcaaggatgaaccgtgttgatctcatggaagaccgccttggccaacaggaatattttgtaaaagaaacgaaatcaatgaacgaagatcttgatgtttctgaagcgattatgaaacttcttgtcgccgaaggcgtccacaatgcagcgcttgcagttactgcacgaattattcaaccttcgctccttgattttttacggtaaggtggggttcgtttgcaacttgagaccagttatttaggcacagtcaaatataagcaggaagacattatcgtttttcagggcggccttccaggatttccggaagaaacagaatttattttactgccgtttaatgagcagccgcctttttatatccttcagtcggtccgtacgaaagagattggctttgtttgcatcaacccatttttgttttggccggactatgaagtggaactggccgattctgttgtgcgccagctaagtgcagaatctgaacaagatgtcgctatttttgtgttccttacaatccagcagcctttctccaaatcaactgcgaatttaagagctccgattgctgttcatgcaaaaaaacgttttgctaagcaactaatgctcgatggagaacggtattctctgaaggcacccattcacacggctggtaaaggagggcgatagcgtgcttgttttgtcaagaaaggcaggcgaagcgatccgcatcatggatgatatcgaaatcaaggtgttggctgtcgagggcgaccaagtaaagcttggcatttcggctcccaaatctgtcgatgtccaccgtggagaagtatatgaagcgatacaggaggaaaataaacacgctgcaaaaccggtatcagcagaaattttgcaagcgtttattaaccatgccaataaagcaagcacctaacacgtgggcttgcttttgctaaaagacgctttaatcgagaaggggatgcgtcctagccaaacgagaaactgagctacgtagaaggaagatggcagattccagacggaatttagtaaataggtctactgcaagtgaggtgcagatatgaaagctcaattgtcagtcgcacttttaccgttaccggcagcagggcagcagcctaaggctttgcagcagcaaaacacgaaacagccgccgatcgacggaacaaaagcagccgcttttataaatgaaacgtcacaacaactaaacaaagtcgcaaaacggtctctaaattttcatattcatgaagagcttgatcgtatttatgttcaagtcattgacgaagaaacaaacgaagttgtccgagaagtaccccctgaaaaaatacttgacttagttgcagccatgttaaaatcggttggtttgattattgaccggcatatctagaaaggagatgggatgatgagactcacaggcttggcctctggccttgacattgatcaaatgatgaaggatttaatgagagcagagcgtatacctgtcaacaaattggagaaacaacggacagagataggttggaaaacagatgcttaccgagaaatcaatttaaaaatgagagcgttccgcgattcgatttttgataatgtgttgcgggcttccaatatgaaaaagcggacagtatcgtcttccaattcagacattgcaacagcaaccgcttcttcttccgtaggcaatgctgcttttacgttaaatgaagttaggcagctggcgacttcggcaactgcaaaaagcaaaaaccttagcggccttacagaaaagtcgcaattgaaagagcttggtataaacgatggggagtgggttgaaggcaaattaaagcgcgaaaccgtccaagtttccgatggcaaagtccagcttagcgaggcaccacagtttgctggagagagcatgctcatcgtcaacggcaaagcgtacgcggttgcagacagtccagacgatctcgcaaaaggagaggtctttataaacgataccggcgaagtgactttttccagtgccgataaagtcactggaaaggtgaccgtcgagtatatccaagcagacagtgaagcgacagaacggtatttgagttcatcggttgcgacaatcgcggcaaatggtgaaaaagtggagagctcgtttttctttaaagaatcagatacgattagttcagtagtgacaaaactgcaaaatgccggggcaaaggtaaatgctttttttgatgaaaatagtggaagccttgttgttacgagaaaagaaactggccattttggtgaagctggtcaaaatgagttgatgttttctggtgctctttttgagcaaggattgggactgaatgacaatgttgaagctggaaagaatgcccagtttacagtaaatggaattgaaacggagcggacatcgaatacgtttacgttaagcgggatgacgattacgctaaaggatacgtctacacaagcggtgacacttagtgctgccacagacgtcgattcgatcgttgagacgattaaatcgtttgttgaggagtacaatgcattactggaccatatgaacggcaaactgaacgaaaaatactaccgtgactatgacccgctgactgatgaagagcgcgatcagctaacggaaagtgaggcaaaacgttgggaagaaaaagcgcaaagtggtctgctaaggagagatcctttattgcaaacagcattgacgaatatgaggcaaaccctttatgagccagttgatacaggcggcgcttttacccacctttcccaaattggcattagcacgaccaaaaactataaagacggcggcaagctcgaaatcgatgaaaacaagcttcgtgctgcaatcgaagaagatgcagacagcgtatacactatttttgcaggcacagacaacaatggttcaggcattgggcaaacgctgcgtgccaatttgtcagacagcatgtccagcctttcgatgcgtgctggtggttcagaaggatattacgaagagcaccaatttacgttagggaaacaaacaaaggaactgacagatcgcatcgctaatttcgaacgtcgccttgaacaaaaggaagcccgttactggcgccagtttacagcaatggaaaaagcgatgcagttggctaacgcacaaagcgagtcgctttacaatttgctatatggaaattaaggaggcactatgagttttacaaaacaaggcgtgtataagcaacagtctgtacaaaccgcttcaccaggagagttgacgcttatgttgtacaatggctgcttaaagcaaattcgcctcggtaaattagcggctgaaaacggagaaattgaacaagccaatacagcaataggaaaggcggaggcaattatccgcgaattgatggtcacgctaaaaacagactctgaggtaggcgccaatatgatgcggatgtatgaatacattttgcaccagttgattaaaggaaatatagagaagagcccagaggcactcgaagaagcagagacgtacgtggctgaattccgcaatacgtggaagcaagtcatccaattggaaaggcagaatcgctttcaaggaggacaggcgaaatgagctatgcttctgtgaaagggcagacagaggagttgcttcatttacttgcgcgcccctttcctcaagaagatgacgagcgtgatgatttccttgaagatgtcaaccggttgctcggactgaggcaatcaatgattgaagcaagcacgagcagatttacaacggaagaagcttcttttttaatggagcaagatcgtctcttaacagcacgcttaaacgtcgtttccgccgcaatcaaacaggatttgaaagaaattgctgaccaaaagcgtgttcataagggctatgagcgaggggccgttctggcaacaaaaggggcgtttattgacgagaagacacgctgaatcacatacccaatagcaacgggcaaaaaccacccaaatggtatcgcgatttgggtggtttgttatggaatcgaagggatatcaatgtgcccgttatcattgactgaagtccttgtgagagacatgtctgtgcgaataacggtgtcgttatcttcaagcaccacttcaaaaacggtgtttgttttttcaagcaagaagctgtttttgtcaataaacagcatatagtctaactgtgacaattggtactggtctggtatttccagcttgctttctgtcggtagcgcccgttcaatcatatccatgttcgcggccatttctctcaatgtctcgccgccagcagcaacgcttatcacgtacaaatcgtcgtattcgctcacattgacaaaatcggagaatggttgcagaagttcaagttgatacatcggagtcagctccaacgatacaaaccgttcacttggatcacctttgtcgatgggtagccagccctcatcgtttatatttgtgtagacgcgatttttttcttttaatacctcgactgttgcgagattttctagttccgtctcctctttttccccttgtcccggtttagcagaaagagctgtataaaatgtttctggagaagctttataggcgagattgccttcaatcacatgaatctgcggttcttcgcctggttcatctcctgtggttgaaatcgtatctgtcgctttaaagttagctgtatagctatttaattgctcttcagcatttttcgcttcttcaatgatcgattctgcatttaatgtggcgtttccgttttgattgtcttgttgtgatgcagaactttcttgcataggagctgaattaggggaacaggctccgagaagggcggtaacgactaagctgccgtaaagatagcttgtgcgtttcaatgtttaccactcccagaaggaataaattaaaggcactttaatgttacaatttgattacaagtgctgatgcctattgtaacaaagatgaaatcgttagggaatagggaattcgtactaacaaagaaatacgttcgtaaaaaggggattccaataaaaaaagcaaaaaaagttttcgacattcttcatcgctacgtttatcttataaaaagcgcgttattatgctacttttcaagaaagcgctcacaatcaaaaagattagaatcgacatcaattgacaagcgttggcgttctttgttaaataaagagtttgacttctaagagttgcgctgttatagtgaaactgtggaaaagcaccacaatgaattttcagtaacgaagggaatgtgaagcatgcaaggaaaagtaaaatggttcaatgcagaaaaaggtttcggttttatcgagcgtgaagacggagatgacgtattcgttcatttctctgcaatcaactctgatggattcaaaacgcttgacgaaggtcaagacgttgaattcgaaatcgttgaaggcgcacgtggaccgcaagctgcaaatgttgttaagctttaattcacattcctgaacggatatgaatgaatagctaatactcaacccgcttttttaaaaaaagcgggttttttgtcgatcttttgtaaagtttattaaggtttgagaaggaatattgaagggaattgtagaagtaagcaaggaaaaggaggagttctacatgcattttaatattcgtggggaaaacattgaagtcacacctgccatccgggagtatatcgaaaaaaaggtggggaaattggagcgttattttgatacaactccaaccgccgatgtaaacgttaaattgcaagttctcgggagtggcgagtcaagcatcgaagtcacgattccaatgccaaagcttttgcttcgtggggaagaaattaacgcggatatgtatgcagccatcgacatagtcgtggaaaagctagaacgccaaattcgaaaatataaaacaaaagtcaatcgcaaatttcgccaagaaggcagtttgaaatatatgtttaaaaatgaattggaacctttgcgagatgaagtcgctgaagacgatgaactggaagttgtacgcacgaagcgctttaatttgaagccgatggatgcggaagaggcgattttgcaaatggatttactcgggcataatttctttgttttttcagatgcagagagcggcagcaccaatgttgtttaccgccgcaaagacggaaaatacggcttaattgaacctgaagcgtaagagcaggcagaaaaagagcatccacggatgctctttttgctgctgtagactgttgaaaacatagtgttccatagggctgctgccttgtaagcgaccgttagaactgctaatatagaaatgataaacgtatcataaagataggtgcaagtcgagggatttgcagtcgcggagagcaatgccgccaagagaggaagatgatgatgcttggattacttcgaaaaatagtcggcgatccagcccaaaaacaattaaagaaaaacgaaaaaatcgtcgatcaagtcgaggcgcttgcagatgaaatgaagcagctttctgacgaacaattaaagaacaaaaccactgaatttaaggcaaaactagaagaaggcgcttctcttaacgatatagtagttcctgcgcttgcagttgctcgtgaagctgcgggcagggtgttaaatgagtatccataccgcgtccagttgctcggtgcactagcgctgcaccaaggcaatattgccgaaatgaaaacaggggaaggaaagacgctcgtcggtacaattgccgtctatgtccaagcccttgaaggaaaaggcgttcatattgtaacggtcaataactacctagcccgccgtgacttagaaaactatgggcggatttttcaattcctagggttgacagtagggttgaatgaaaatggcttgacgagagaagaaaaacaaaaagcatatgccgctgatgtgacctatagcacaaataatgagcttgggtttgattatttgcgtgataacatggtgctttacaaagaacaaatggtgcaacggccgctccattttgcgttaatcgatgaagttgactcgattttaattgatgaagcacggacgccgctaatcatttctggttctgttgaacggaaaacaaaactttatggacaagccaatacatttgtgcgcgttttaaagcgcgatgctgattacacgtacgatgaaaaaaccaaatcggtccagttgacggatgaaggtgtcaataaagcagagcgcgcgtttaacatcgacaacctttatgatcaaaagcatgtccaattgaaccatcatattaaccaatcgttaaaagcccatgtggccatgcaccgtgatgctgactatgtggtagaagacggcgaagtcgtgatcgttgaccagtttacgggacgtttaatgaaaggaaggcgttatagcgatggacttcaccaagccctagaagcaaaagaaggcttagaagtgcagcgcgaaagcatcacgctagcgtcgattacattccaaaactatttccgtatgtatcaaaagctcgcaggaatgaccggtacggctaagacggaggaagaagagttccgcaatatttacggcatggacgtaatggtcatcccaaccaataaaccggttgctcgggaagaccgccctgatttaatttataagacgatgcaagggaagtttaacgcagtcgtcaatgaaattgccgagcttcacaaaaccgggcgtccggtgctagtaggtacggtcaacgttgaaacatctgaagttgtttccaaaatgttgacaagaaaacggattccacaccatgtcttaaatgcgaaaaaccatgaacgagaagcagaaattattgaaaaagctggccataaaggcgccgttacgatcgcaacgaacatggctggccgggggacggacattaagcttggcccaggggtcaaagagcttggcggcctccacgttcttggtacagagcgccatgaaagccggcggattgacaaccaattgcgtggtcgtgctgggcgtcaaggggatgtaggttcttctcaattttatttgtcaatggaagatgagctgatgaggcggtttggctcagacaatatgaaagcgatgatggaaaagctaggcatggaagacgaccagcctattgaatcatcattggtttcaagggcagtggaaacagctcagaagcgggttgaaggcaataactttgatgctcgtaaacaagtgctccagtttgatgacgtcatgcgtgagcaacgggagatcatctacagacaacggatggaagtgcttgaagctgataacttaaaaacaattgtcgagaatatgatgaaggcgactgtagaacgtgttgttcaaactcattgccctgaatcgctcgttcaggaagaatgggatttggctgctgttgccacctacatcaacgggcaattgctgtctgaaaacggaattagtgagaaagagctgaaagggaaagagcaagaggaactgatcgagttgattaccgaaaaagtcctcgctgcataccatgcgaaagaagcagaagtctcttcagaacaaatgcgcgagttcgaaaaagtgatcatgctgcgcactgtcgaccgtaagtggatgaaccacattgaccaaatggatcaattacgacaaggcatccatttgcgcgcttacggccaaaacgatccgttacgtgaatatcgctttgaaggctttaatatgtttgaagcgatgattgctgaaattgaagaagaagtatctatgtacgtgatgaaggctcaagtccagcaaaaccttaagcgtgaggaagtagctgaaggtaaagcggtgaggccgtcagccaatgggcaagaggacaaaaaagcgaaacggaaaccagtccgcaaagccgaaaacattggcagaaatgatccatgcatttgtggcagcggcaaaaaatacaaaaattgttgtggggctaaccgataaggagccctctgatgtagaggtgtaaacgatggacatgacagaaatgaagcaagaactagtggcgctcgagaagcgactatctgactttagggggtctctttgacgtcgcagaaaaggaagagcggatcgcggagttagaagaaaaaatggctgatcctgatttttggaatgaccaggagcaagcgcaagcgatcattaatgaaacaaatggtttaaaagaacaagtccatacattcaaagacatggctgaaagctatgacgacttggaagtcagttatgagcttgttcgggaagaggacgacactgaactggcaagtgaactggaatcgggccttgctgcgcttaaacaaaaaatgaaccaatttgagttgcaattgcttttaagtgccccttacgataaaaacaatgccattttagaactccatcctggcgcaggcggaactgaatcccaggattgggcttctatgttgctaaggatgtacacgcgctgggcagaaaagcgtgggtttgctgtcgagacgctcgactatctccctggtgaggaggccggcgtcaaaagcgtcacgctgcttataaaagggcataacgcatatggctatttaaaagcagagaaaggtgtgcaccgcctcgtgcgaatttcgccatttgactcatccgggaggcggcatacgtcctttgtgtcatgcgaagtgatgccggaattagatgatgcagttgacattgaactaaatagcgaagacttaaaaatcgatacgtatcgtgcgagtggggcgggcggccagcatgtcaacacgactgactcggctgtgcggattacccacttgccgaccaatacggttgtgacttgtcagagcgaacgttcccaaattaaaaaccgggaacaagcaatgaaaatgatgaaagcgaaactgtatcaactgcggattgaagagcaagagcgtgaacttgctgaaattcgtggcgaacaaaaagaaattgggtggggaagccaaattcgctcctatgtgttccatccttattcaatggtgaaagaccaccgcactggctttgaaattggcaatacgaacagtgtcatggatggagagattgacgggtttattgacgcttacctgagacaatcgctggcaatgtagcaacgaagcctgagaatgttaaatatcaagagcgaccgcttttataaaggagaacatgtatgggaagggctcgccgagacaggcaatccagtacgggggctgaaaaatggctaaattatactaggattttcattggctcagccatagtcgggatttcatttaatttgtttttattgccaaatcaaattgcccctggcggcgttagcggtattagcacaatcgccaactatgtgtttgggtttgagcccgcctttaccctctgggctttaaacattccgatctttcttttaggtgtgctgttgttgggaggctttcgttacggggcaaaaacgctcattggcacgctatttgtcccccttgttgtctttttaacaagagattgggttgtcgaagtaagcgatcctcttctcggtgctttgttcggaggcttgggcgtcggtcttggccttggcctcgtttttttagccaatgcgagcacgggtgggaccgatctactggcacagattgtgcaaaaatttacagggctttcagctggcatatgtgtcggcatgattgacggcctcgttgtcatcacgtcggcgtttgtctttcatatcgaaatggccttgtatgcattaatttcgctgttcgtaacgacaaaaacgattgacctcgtgcaaatggggataggctattcaaaagttgcctatattatttcttctcaagaggaaacggtacagaaggcactgtttgactcagtcgaccgcggtgtgactaggctcgtcggttatggtggttatacgaacaaagaacgggcggttcttatgtgcgttgtcaaccaaaatgaggtggcgcgattaaagcaaactgtaaagagagcggatccctatgcatttattgtgctgacaaatgcttcagaagtgctaggagaagggtttaaaaaaaggtaaagttgattgagtgcgctatgacgagcgctctttttttttgccctttttctccatgtgtttagacttgtgaaaataggtacatttaatcattcactcataggctaattagaccgaaataaataaagagtgctccaatggtcggaaatgcgatacgaacacgcaaatcaagcaattatcacgaaactgaaataaaaatgtaatgtcaccctgttgctgctgatgatataatgaccgcgaagcatgtcgaaatcggaattcgtttgttatttcggtaccaaggtttaaaggtgtggttgaatgagtttgatcaaactaaatgatgtttggaaagtataccccaataatgttaaggcgttaaacggcatgactgtccaaattgaaaaaggtgaatttgtttacgttgttgggccgagcggtgcgggcaaatcgacttttattcgcttaatctatcgtgaagaaaaggccacaaaaggtgatatttttgtaaataatattaatttatcgactttaaaacataaagaaattcctaaacttagacggaatatcggagttgtgtttcaagactttaagcttttgccttctcttactgtccatgaaaacatcgcatttgcacttgaagtcattgaagagcatccttccgatattaaaaagcgtgtaaatgaagttttaaatctagtaaaattaaaaagcaaagcaaagttcttgccgagcgaactatctggcggcgaacagcaacgggtggcgattgctagagcaattgcgaatcggcccgatgttttgatcgctgatgaaccgacgggcaatttggaccctgagacggcttggacgattatggacttgttggaaagcatccattccctaggtacaacggtgatcatggcgacacataacaaagagattgtcaatacgttgaaacgtcgtgtcatcgcgattgaaaatggccggatcgtccgtgatgaagcaagggggaattacggctatgaagtttaaaacaatgctgcgccatctccgcgaaggaatcaagaatattggccgcagcggatggatgtcatttgcgtccattagtgcggtaacggttatgctttttattgtaggcttctttttaattgtctttgtgaatggaaaccacatcgcatcgacgattgaaaacaatgtagaaattcgtgcctttattgaacggggaactggcgaagaggaagtgcaagaactattagacgaagttcgtacccttcctgaagtagaagaggttattttcattgataaagaggaagggttagaaagtttaattgcttctactggagaagtgtatgaaagtataagagaagagaacccactgccggatgcattgaaagttactgccgcctctcctcaagaaacagaagccgttgcccaaaaagtcaatcatcatgattatgtaagcaatgtatcttatggggcagatgtactgcctgatttatttaaactaacgaatacaagccgtataattggcctagtagttattctcggcttgcttttaacggcgatgttcttaatctcaaatacaattaaacttacaattgttgcccgtaaaaaagagattcaaattatgaaactcgttggagcgacaaatggctttgtacgtagtccatttttagtcgagggcgctttgttaggtacctttggcagcattggcccgattctaattctaagctttggctatcaatacgtgtacagcaattcaggcgattttttacaaagctcgctttactcgcttcttgagccagggcagctgattgtgcaagtgtcgctgttgctgctagctgttggtttaattgttggcatttggggaagtgccatgtctgtgcggaaatttttaaatgtgtaatcgaaatagggggaaaaacggtgaaaaaacgaatggtcactacaactgctgctttaaccattgctggcgctttgctaggcagtagttttcagccagcttttgcagaacccgatataaagaaacagttggatgacgtgcaagaacaacaaaaagaaaacgttgaaaaagccgaaaaaacggagtccgatctaacgaaattagacagcgaattaaaagatctccaagcagaattggatgaattgaagcaggaagaagaaacaacacaacaaaacttagacgaaacagaagcggaattggcagaaatagaagcggatatcgagtcattagaggaagaaattgcggttatggaagaacgaatagctgagagacgggggcttttggaagaacgggccgttgctgcctatgaatctggtggcgaagtcagttatttagaagttttacttggtgcgaaaagttttggcgattttattgaacgggtttcagctatttctacaattgccaaacatgaccaggaaatgcttgatgaatacatagctgatgaaaaagaactacaagcgaaaaaagaggaagtagaagaaaaacaggctgatgtcgaagcgcaaaaggcagaactcgaagcgttaaaagaagatcttgttgagcaaacggaagaaatagacgagttgcaagcggagttaaaagaaaaggaagaagaactacaagcgcagttaggcgacatcatgtctgaggaagaatccttgcaaaagcaagaagaagcgctggaagctgagttaaaagcgtgggaagaagaacaggaacgcctaaaagaagaagaggaacgtaaagcccgtgaggccgaagaacaagctgctaaggaacaggaggcggcaaaggcgaaggaaacggaggaatccagcgaaatagcccaagctgctgaaaagccgcaagcaggcgacgataacaacaacgagaagagcaaccaagaacaagaggctgttccttctgtagaaagttcaggcgcgtttgtacggccggcaacaggatcgattacatcgaattacggccaacgctggggaagaatgcactggggcatcgatattggtaagaacggcagagcgggcgatgtgccaatcgtctctgtgttagatggaacggttgcttctacagaataccgcagtgactttggcaactgggttgtcgttacccaccaaatcgacggaaaacaactgacaacagtgtatgcccatcttgaacggattgatgtcagccctggtgaccgtgttaaagcaggccagcagctgggactaatgggcaatacgggcaggtcgacagggccacacttgcacttcgaagtccatgaagggccatttaactgggaccgttcaaatgcagtcgatccgatgaaatatatgtaaatactcgagcgccttggcaagtacagggcgctttttttgtgaatgcaaaatcgctttttgacagaagcttgccgacaaattagaatggaaagagaaacgaaacagaaagcaaggcaattcgttttataagtgggagtggtgagcaattttgaaaacaaagcatctcgtgtggacagtagctgtgctggcagccgtgctggtcggagggtttttctttataggtggtatgaacactggctctcctaatccgattcagccaaacaatggaaatgaatcggttgtggaattaagcgatgacgaattaatggataaatttgagcgagcactcgccacgattgagtcggagtacgtgacagagacggatcgccaacaattaattgaaggtgccatcaatgggatggtagaaacgttaaatgacccattttctgactatatggatgtaagttcggcaacagattttcaacagtcgctcagctctcattttgaaggaattggagcggaagtcggcatgatcgacggaaatgtttcgattattagcccgatgcgcgagtctccagctgaaaaagcaggacttttgccaaatgatgccattattgccattgacggcgagtcgattgaaggctggtctgttaatgaagctgtggcgaacattcgcggcgagggcggtacaaccgttacgttgacaattgcacgtaatggagtgaaggagccttttgatgttaaaatcgaacgggatacgattgaagtcgaatctgttcgcgcagatacgtttgagcaagacgggaagaaaattggcaggctggaaatcacctctttttcagaggacgtaggcacccaatttgaagagcagttgcagacgttagaagaagacggaatcgacggtttggtcattgatgtccgcggcaatcctggcgggtatttagaaggagcgaccaaaattggtgacgcgattattccagaaggcaaaccggtagtgcaaattgaacatggcaacggcgaaattgatagttatttgtcaaaaatgaaaggcaaaaaaccttatcctgttgtcggcttgattaatgaaagcagtgcttcagcttctgaaattctcgcagctgcgttaaaagagtcaggcgactatgatttagtaggcgagacgacatttgggaaagggactgtacaaaaatcaatcccaatggatgacggcagcgccttgaaaattacgacagaccggtggttgacggcaggcggcaacacgattgatcaagagggagtcgagccgaccgttaaacaacggcaacctgactatttttatgctgtcgcgcttacagtagaagaaacgtttgtcaaagaccaagtgtcagaccaaattggcaatgcccaaaagatgctgactggcttaggcttcgatgttggccgggatgacggctattttgacgagaaaactgaagaagcgatcattgcttttcaacaatcccatgatttacaagcaaacggcgaattgaatgaagaaacggcaggaaaacttcaagaagacattttgtcccatattcgtgacactgctaacgatgagcagctgaaacgggcggttgaattggctgctgagcaagcgtcccaataggcaggaaacagccggaagtttgtcgaaacgtaaggatagctgcctttctaggggcggttatccttttttgaatctgtaggaaaagctggaggatataaaatgatagaaactactttgacagccattagtagctttttgctgcacccgcttttttacataggcattgctgcttttgcctttatcggcgctgttcgcgttgcaaaagaaagagcttcttttcatacacgggtttacgccaaacgtgctgattttgtcctcagcctcttgcctggcttgcttgccggcctgatcgcaagcttcgtgcttattggttatggcttaacactgaccactccagttttgctgcttgttgcagcggcaagcttgctattactactaacggggcggatgcagctacagtcgcctgcttactacatccctttagcagcagttgcgcttgctttgctgccaagcctcacattaccaacatggctagacggcgaacttgagtctcaaattttgtacccaagcctatttttgtttgcagctgttacccttctcgcccaagcatttctagttcgctttaatggggcagcattgacctccccgcgcttggaaatcggcaaaagagggcgctttgtcggtgtgcatatcgcaaaccgcctttggcttctccctctcgttgtgtttataccagagggaatgcttcctgccttttcctattggccgcttatccacatcgagggcatgacgtttcaaccgctgttgatccctgtccttgtcggttttggcaagaaaatcggttcattgccaaaagacaccgttgctactgaagccaaggccatttatcctctcgcagtacttgcgtttgtaggcgctgcagctctctatttcttaccggagtattggtttttgtgcttgtggtccgctttgttggcgggactaaaactggcgcttgatatccgttctgccattgccgaaaaaaacaagccagcttttttcacggaagaagaaaaaggttgccgtgtcgtcggtgttcttcctggcagcccggcggaaaaaatgggcattgccattggggaagaaattacgaaagtaaatggccaacctgtccataatgaacaaacgatgtatcaagcattgcaaatcaatcctgtatactgcaagctagaagtaaaagacttagcaggggaagcacggtttgtacatggacctctttacagcggcgagcattaccagttaggggcgttgctcgtgcgccaggaagaacagctagcagactccattgtgtagcgtagcggtcaatcagtcataagaaacgctaattaggcgagggaagatggggaatgtaatgttcatacgtatagggctgcgacaaaaaacgcgtatgggggcgtttgtctacagtctgaaacccgctccgaaggaggagcgggtttttttatggtagcagcatgaaaggaacaggtagccctttatgcggaagcagcccgtttttctaaaggcggcaatacttctttggcatcctgttgcttggaaatctgataaagaacaatccagattagcgcaaagccaagcgcttgaggaaacgtaacggtttcttgcatcgtcacccaggagacaagcaatcctgccattgggaaactaagctcggcaatcgtagccacagaagctttaattgcctgcaagccccggtaataaagtagcattgagaccaagcctggcaaaagcgctgaagctagtaagtttatgctaataaagaagagagctgcagccgaagctggctcgttccaggcatctggcgaagttaaaacaaggacgctaagcaagggcaaagccaagagaaagcggagcgccgtcactgtttcatagcggcattttcgtaaaagcaaacgtcccataacggtggagccgccccataaggctgctgcgccaatggcgaacaggctgccaagttgaaaaacatcgccaaacccgctgattggcaaggaaaagccaaatgtaagtaaataagtaccaacaagtgcgattggcacgagatacccaaaatgttttggccatgattcttttaaaacaaaacgggcaagcacaatcgcgaaaatcggctggagcttttgcaagagcaacaccgaattaatttgtcccattccgtgtgtcgctgcgtaagtgagcccctgtgtgaataacaacgtagcaatagctgagccgccccacgatatgaaaagcaaggcgccaatgtcgactaacgacaaatgagccaagtcgcttctatatgtccaaataagaggaacggcgataaaagccaaaataatatgttcgataaagacaatctgcaaagacgtcattgtttcaaggagaaggaggcggaaaagagggttaatgccccagaaagccgctcctattacaatgaaccaaaatgttttttgcgtgtgcggttgttgcatgtgatgtcaaaaccctttcgtttgaatcggccctcctaaaaatcaaaacagccctgaatgtgcacgttcattcagggcctctcaaataagcatgggcgcgtcttgccatgcttatccgttgatcttctcccatccggactttaaccgtcggctttggaattccaccaaatcagtcccctttttgataaacgaaaaggagagtcgcgggcttttaccgccggccaggagtttcacctgccccgaagatacctattcattatttttagcatgttaatcttaccgtaattgtcggcattcgtccagcgtcaggaatccaattcaattggaaattatttttagtacgtatgttcgtcaagtttgtaggtatttgcatcaggttatgctataatgaaaagcgaacacttgtttataaagaacgacaaaggcgggccacgtcttaaaaccgcacgtgctaagatccaaacaagcccatgcttgacggcaaacgtttcggctatcgacccgcctaatattgttggataaaaatggctttaggattgagtgacaaataagcttcatccctcgcatgtttggttgtctgcaagtgagggaagtttttgtattaataaataaaggaggaaggtagcactttcgtgaaaagggcgaagccgattcatgaaagtaccaagtgattatggaccaaacgtttcagcttgtatcagattattctcctcaaggggaccagccaaaagcaattgagcaaattgtgacaggcattcaaaacggcaaaaagcaccaaacattgcttggcgctaccggaacgggtaagacgtttacgatgtcaaacgtgatccaagccgttaataagccgacgcttgtgatggctcataataaaacgcttgccgggcaattgtatagcgaatttaaacagttgtttcccaataacgcagttgagtattttgtcagttattatgattattaccaaccagaggcttacgtcccgtcttcagacacgtttattgaaaaagatgcaagtataaacgacgagattgataagcttaggcattcggcgacaagttccttgtttgaacggagagatgtcatcattatcgccagcgtgtcttgtatttacggtttaggttcaccagaagaataccgagacttagtgttgtccattcgcacaggcatggaaatggaccggaacagcctgttgcggaaattggttgacatccaatatgaccgcaacgacataaattttgttcgtggtacattcagagtccgcggcgatgtcgtcgaaatttttcctgcttcacgggatgaacagtgcatgcgtgttgaattttttggcgacgagatagagagaatcacagaagtggatgccctcactggagaaataaaaggcgagcgtcaccatgtctctatctttccggcttcccactttgtgacccgtgaagaaaaaatgaaaaaagcaattgccaatattgaagtggaattagaagaaaggctttccgttttgcgcaaggaagagaagctgttggaagcgcagcgtttagagcagcgcacccgttatgatttagaaatgatggcggaaatgggcttttgttcagggattgaaaactattctcgccatttgacgcttcgggaagcgggagcaactccgtatacattgttggacttttttccgaaggactttttgcttattgtcgatgagtctcacgttacccttccccaagtgcgaggcatgtacaacggcgatagagcccggaaagaaattcttgtcaatcatgggttccgtttgccctcagcccttgataacaggccgttaaaattcgaagagtttgaagagaaagttggccaggccgtctatgtatcagccactccaggaccgtacgaactggaacacacgcctgaaatggtcgaacagattatccgcccaactggtttgctagatcctgtagtagaagtccgcccgattgaagggcaaatcgatgacttaatcggtcaaatccatgaccaaatcgccaaggacgagcgtgtgttagtaacaacgcttacgaaaaagatggcggaagacttaactgattatctaaaggaaatcggtattaaagtccgttatctccactcggaagtcaaaacgctagaacggctagaaattattcgccaactgcgccttgggacatttgatgttcttatcggcataaacttgttgcgggaaggcattgacattccagaagtgtcgcttgtggcgattcttgatgccgataaagaaggatttttacgagcagaacgttcgttgattcaaacgattggccgggctgcacgaaatgcgaatggccgtgtcattatgtatgccgataaaatgacccactcaatggaagtggcgattaacgaaacgaaacggcgccgtcaaatccagcaggcatacaatgaacagcatggcattacaccgcaaacgattcaaaaacggataccagaagtcgtgcaagcaacgtatgcagcggaagagaccggcgattacaaagcttcctcgacatcatcgaaaaaactaggcaaaaaagaacgccaggcaacgattgagcgtgtagaagcggaaatgaaacaggccgctaaagagttgaattttgaacgagccgctgaattgcgcgatgtgttgttagaattaaaagcggaaggatgacacgaataaatggcacatgaacagattgtcgttaaaggggcacgatccaacaacttaaaaaacatggatgtgacgattccgagggataagcttgtcgtgttaacaggcctctctggttctggcaagtcatcgcttgcatttgataccatttacgcagaagggcagcggcgttatgtggagtcgctgtccgcttacgctcgtcagtttcttggacaaatggataaaccggatgttgactcgatcgaagggctgtctccggcgatttcgatcgatcaaaagacaacaagtcgcaaccctcgttctacagttggaacggtaacagagatccacgactacttgcggctattgtatgcccgaattggtcggcccgtctgcccacgtcatggcattgaaatttcctcgcagacgattgagcaaatggtggatcgcctccttgagtatccagagcgtactaaaatgcaaattcttgcgccacttgtatcagggcgtaaaggcacgcacgtaaagacgcttgaacagattaaaagagacgggtatgtccgtatccgcgtcgatggagaaatgcgggaagcatccgaagaaatcgagctagataaaaacaaaaagcatacgatcgaagtagtcattgaccggattgtgataaaagagggcgtccaagcgcgaattgcagactccctggaaaccgctttgacgcttgctggcggcagagtgctcgttgacgtcatcggcgaagaggagttgttgttcagtcagcagcacgcatgccctgagtgcggtttttccattcctgaacttgagccacgcttgttttcatttaatagcccgttcggcgcttgcccatcgtgtgatggacttggttcaaagcaggaagtggacagtgagcttgtcgtgccagacccaaaccggtcattgcgtgaacatgccctcgctccgtgggaaccgacaagttccaattattatccacagttattgcaagcagtgtgcgaccactttggtattgatatggacgtgccgtttgaaaagctgccagcaacgcagcaacaaattttgttagagggaagcggaaaggagaaaatctttttccgctatgaaaacgactttggccgcgttcatgaacatacaattgtatttgaaggggtgctcgccaatgtagcccgacgctatcgagaaacaagttctgattacattcgcgaacaaatggaaatgtacatgtcgcagaaaaaatgcccaacgtgcaaaggttataggctaaaaaaggaagcacttgctgtttttgtcggcggcaaacatctaggcgaagtgagccaaatgacatgcaccgatgcgatccaatttgttaagtcgcttgacttgactgaaaaagaacgcgccattgctcgtttgattataaaagaaatcgaagaccgtctaggctttttagtcaatgtcggactcgattacttaaccctttcccgagcggcggggacactgtctggaggagaagcgcagcgtattcggctcgctacgcaaatcgggtcatcgcttatgggtgtgctttacattcttgatgaaccttccattggcctccatcagcgtgacaatgaccgtttaatcgagacattgaaacatatgcgtgaccttggcaacacgcttatcgtagttgaacacgatgaggacacgatgctggccgctgaccacattattgacatcggtccaggagcagggatgcatggtggatatattactgcgcaaggaacgccaaaagaactaacagaaaatccccattcgttgacagggaagtatttgtcaggggaaaaatttatccctgttccccgtgaaagacgtcctcttactgatcgctcgtttacagtaaaaaaggcgtcagccaataacttaaaaaacattgatgtcacgttcccacttggcgtgtttatcgctgttacaggtgtttctggctctgggaaaagcacgctcgtcaacgaaattgttcacaaagcgctggcgcagcggattcaccgcgccaaagcgaagccaggaccacataaagaaatcattggcattgatgaaatggataaagtgattgacattgaccaatcgccgatcgggcggactccacgttccaacccggcaacatacactagcatgtttgacgatatacgggatgtgttcgcgatgacgaatgaagcgaaagtccgcggttataaaaaaggacgtttcagcttcaatgtcaaaggggggcggtgcgaagcctgtaagggtgacgggatcatcaaaatcgaaatgcactttttgcctgacgtctacgttccttgtgaagtatgccacggaaaacgttataaccgcgaaacacttgaagtgacatataaaggcaaaacgattgccgatgtattggaaatgacgatcgaagaaggcgctgaattttttgccagcattccaaagattaaccgcaaaatccagacgctcattgatgttggtctcggttatttaaaaatggggcaaccggcgacgacgctttcaggtggggaagcgcaacgggtgaagttggcctcccagttgcacaaacgctcaacaggacgaactctttatattctcgatgaaccgacgactggtctccatgttgatgatattgcccggttgttaaaagtgcttcaacgccttgtcgacaatggcgacactgtcttggttattgagcataacttagatgtcattaaaacggctgaccatatcattgaccttgggccagaaggaggcaaaaacggcggcacaatcgtggctgaaggaacgccagagcatgtagccgaaaccagtgcctcctatacaggggcctatttaaaacctattctagctcgtgataaagctagacaagaagcgttgtttgccggggcagagcaaaaaagttcataaaagctgaaacatcttgcctagctgctccgtaatacagtaatagaaagccgataaaggagcgattgccatggaagaacgtatgatgatcttgaaaatgattgaagatgggaaggttacagcagaagaagggttgcgtttgcttgaggcgatcggcaaggacgaagccgattcagcaaaacaggattctcatcaaagcgggcgtaacaaagacacgcgggaagagtcgcctctttcaaagttgagtggtttttttgaaacagcgattcaaaaagtgaaagagggcgacttggactttaattttggaacactgacagaaattgaccacgtcttccaacagcaaaacatttcgcctcgttctttgaaagtatcattagaaaacggatcagtcgacgtcgttccatgggataaacaagatgtgcgcttggagtgccaagtgaaagtgtatcgtgtacgtgatactgagcaagcaaaagagtttttccttaaagaatctgtattctcggctacagatgaaacgttgttgtttgaaacaaagacgaaatcgatgaaagtggtggcaacattgtatgtgccccaatcctcatacggacgtattaagctttatacatttaatggcgctttaaaaggggaagacctaaaggcggatacatttgaagccaacacaacaaacggttcgattaaaacaacaaatatcgaatcgaaaaaagcgagcatggagacggtcaatggcagcatatcttgcgagcaaagccaattgcaacttcttgatgctaaaacattgaatggttcggttaaagtatccggatcgatccaagacgcagacgtagaaacagtcaatggctcgatcacttatgagatggaagcgtcaaccgatgcaggctatgttgatttaaaaacaacaacaggaagtgtgaaattgcttgtttcccctgctgtgcgcattgaagccaagctaaagtcaaatgttggctcaatcaataaccgtttggctgatgtagaaattctcgatgagaaaaaagaatttgcgcagcgctacatgcagttgactggcaaccaggcgcaagaaaagcgtgtcaaagtccatgctgtcgcgaatactggcagcattactgtacaagataaagacagttaaagggaatgccaacgaaaggaatgggaagcatgaagcgccttacaaagtctcaagataaacagctacttgcaggcgtctgtgccaggaatgccgactatgtgactatcgacccgttccattgtgcggcttattacggtcactttagcaatcccaacatcgttttttccaatcgtgcttgtctatatagtggcgatgttgcttatgccgataaaggagcgtgtttaatatgagatggcttctcggtttagtcttaaacgctctcgtgttatggatgctctcacaactgttttctggcttttacttgtctagctttttcgctgcactagtagcagcgtttctcctgaacattttaaattggacagtcaagccgattttaacagtattaacgttgccgatcacgattttgacgctagggctgttcttgtttgtcattagtgcaataacgctcatgctgacatcgatcatgatgggcagcgcttttgaaatcagcggcttcggcacggcattgcttgcagccgttatcattgccctgttccaaacatttctcatcaaccccattaaaaacaactaacaggccgcattcgcggcctgttgaggttatcgactttgtcgataagcgcactcagactgatagaaaacgcttgccagacgaggagtgcaggcgagggaagatgcgaatagaacgggggttcatgagcatatgaccgaggcaaacgacgacgtatgcgagcgtttgtctacagtctgaacaggccgcattcgcggcctgttttttataaccttttttaggcgtctggcgcaaatcatgctacaatagctctagcacgattcgctcttgtaagtggacaaatgaggtgaaagaaaatggcaaaagtcacagcaaatgatttgttagagaaatttcaatttgaacttttagctggcgaagaaggaatttaccggcccataacaacaagcgacatttccaggccaggaattgaaatggctggcttttttacatattatccagcccgtcgcctccagctcattgggcggacggagctttcttttttgaagtcgctctccgaccaagaaaaggaagaacggatgaccaaattgtgtacgtatgacacaccaggcattattctttcacgtggtctggaagcgcctgaacaacttattgccgctgccgataaacgtggcgtgcctgttttgcgttcgacattaacaacaacgcaacttagtagtcgagtcaccaatttcttggaaagcgaattagcgcctgtgactgctgtccatggcgtgcttgttgacatttatggcattggcgttttgattacaggcggaagcggcgtcggcaaaagcgagactgcacttgatttggttcgccgcggccatcgccttgtcgctgatgattctgttgaaatccgccagcaaaatgaggacacgttagtcgggtatccaccgccgcttttgcaacatttgctagaaatccgcgggcttggcatcattaatgtcatgacgttatttggggcaggggcggttcgtccgtttaaacggattagcctttgtatgaatttagagctttgggaccaaaccaaagcgtatgaccgtcttggactcgaagaagacaaaatgaaaatttttgatacggaaattaccaaaatgaccgtccctgttcgtccagggcgaaatttagctgttattattgaggtagctgcgatgaatttccgcctgaaacgattaggctttaatgcagcacaagaattttcggaacgtttaacccaagtgattgaacaaggggaaaatgaattttaaagacaggggagacgaacggaatggaagaacaaattgaaccgattgaccgcgtttttgtccagcttgggcccatcgcgatttattggtatgccgtcctcattctgcttggagtcgccgtcggttattttatggcgcggcgcgagtcggttaagcgaggactgccgcaggagacgtttgctgatttgctagtctgggcgttgccgatttccattctatcggctcgagcttactacgttatttttcggtgggagcagtttgctgataatccaattagtgttttttatttgcgtgaaggcggaatagcgattcatggcgctttaattggagcggttgtcacagcgattgtgtttgccaaaaaacgtgggttgtcgttttggaaactcgccgatgtggcggcgcctagcattttgattggccaagcgattggccgctggggcaattttgtcaatcaagaagtatacggggcggaagtcacaagggaatttcttgaggggatgtttttgcctgattggattattaatcaaatgtatattaatgggacgtactatcaaccgacatttttgtacgaatcgctttggaacgtgctaggagtagtcgtgctattgctccttcgcaaagcaaacttgcgccaaggcgaactattcttatcgtatgtaatttggtattcggttggacgttttgtgatcgaaggcatgcggttagactatttattaattggcgattcccttcgcacagcgcagcttttatcgatcattttggtcgtggcagcaattgctctttgggtataccggcgcctttgggtaaaaccgccgcggtacttgaatccagacgcagctacaaaacagagaaaatagagagggaagatacggatgggaatggtgaaacgaggcttgttgtccggcctgtcaacaacatggacgctcgggaaaattatttttccggttacgctcattgttactttgctaggctatacgcctctactcgattggctcgctaagctgatcgcccctttaatgggcttgattggtttgcctggagaagcggcaattcctttagttattggcaatgtacttaatttatacgcaggcatcggcgcgattttgacatttgactttactgtaaaagaagtatttattttagcgattatgctttctttttcacacaatcttattatcgaatctgcggttgcgacaaaggtaggcgtccgcgtatcggttattgtggcagtgcggatttttctagctgtggccgcagcctttatcatcaatcttgtctggagtggcgggagcgaacaagcggtctatgggctggcttcagcccaagggcctcaagcaactggggttatgggaatggtagccgatggtttatggactgcctttttaggtgttgttcaattagcggctattgtcattccccttatgcttgttgtccaaatcatgcgtgagcgcaactggcttgccgttatttcgaaaagtttagcgccgctgacgcgattgattggtgtcggggaaaacactgctgttacactcgcttctggattaaccattggcttagcctacggggctggcgtgatgatcgatgcagtcaaagaagaccgtgtaaaaaagaaagatttgtatgtggtgtttatttttctcgttgcttgccatgcggttgtcgaggatacgctggtgtttctcgtccttggcattcaagtgtggccattgcttgttatacgccttttgaccgcactgctgttaacaatggtgatttcccgtctctggacacagcttgagaagaggaaacaagggaacttcggaaaggatgctgtttatgaccattaatacgttgctatttgatttggatgggacattgatagatacaaatgaattgattatccaatcttttctccatacattggaaccagattttccaggtgtctatacccgggaaacggtgttgccatttatcggtcccccgcttgtagacagcttttcacgcattgatgcttcccgtgccgaaaaatgggttcgcacataccgtgattttaaccatcaacaacatgatgcgcttgtaaaggaatacccaggtgtaaaaacaggcatccaaacactgcataaacaaggttacaagctagcggtcgtgacgactaaaatcagggaaaccgcgcaaatgggcttagagttgatggggctttccccgtactttgatgtaatcgtcgccttggacgatgtaaaacatgcaaaaccgcatcccgagccattattggaagctcttaggcaacttgattcaaaacctgaagaagcgatcatggttggtgacaattcacacgacgtattggcaggaaaagcagcaggtacgaaaacggttgcggttggctgggcattaaaaggcgctgagcatttgcgcacatttgcgccagattacataccagcaacgatggaagagctggttgaaatcgtgaatcgcctgtgagcagaaagacagaacgtttcccggtaagcgggtcgaactcattgtggcagctttaccgaaccgtttccttttggaaagtcgcaaaaacgtttgccgttgcccaaatagcgcgcttcaccccatcgctgcgaatgaaaaactggctttaccgtgtgtttttgaagatggaaattggcagccagacagcaatcgctttaatggtcatggtcgatgtcatgtttcctgagagaataaaaataggagccaactccattattggctacaatacgacgattttggctcatgaatatttgattgaagagtatcgactcggccatgtggtgattggcgacagggtgatggttggcgccaattgtacgattcttccaggcgtgacgattggcgatggcgccattgtaggcgcggggaccgttgtccataaagatgtgcctccaggagcgtttgtcgctggaaatccaatgaaacaaataaggtaacttcacgtacaatagcgttagctattgtacgtttttttgtaaatgggccagttgacttttcgttagggcaattgtaaactagaaaaaactttacttcattagtgatttagcaaactaaagtaaagggcagttaggagcgaacgttgtgtctgagccttttatgtttgaaaaacctttaggcatgcgcgatgtgctgccgaatttgcattcaatgcaacgaaaattaggcgatcgtgtattgcaagagtttcggttatggggatacgagcaagtacaaacgccgacgcttgaatattatgaaacagtcgggaaagcgtctgctatttcagataagcagttattcaagttaattgattttcatggaaatacgctcgttttgcgccctgatatgacggcgccaattgctcggctcgtttcctcaagtatgaaagacatcccttatccacttaggttatcgtactgttcaagcctttatcgagctttgcaaacggaaggcgggcgtcctgccgaatttgcacaagtcggcgttgagcttgttggtgatcataccgccagcgctgacggggaaatgttgctgttgttgaacagagctcttattcaagcaggtcttgaccattttcaagttgccgtcggccatatcggtttcttaaatgcgttatttttagaaattgttggcactgaagaacgggctgagctgttgcggaggcaactctatgaaaagaacgatgttggtttcaaagagcaagtaaaggcatttgggctatcatcgattgatgaaaagaagctgttaaaactaagccggttgcgcggcaatgaagcgattcttgctgaagcggagcagctaaccgaatcagcagaaggcaaacaggctgtggcggagctgcgagacctttggcaaggcttgaaagagggagggcttacccgttatatgaaacttgacttaagccttgtcctccatatgagctattatacaggttgcatttttgaagtttaccatgaccgcctcccccgtccccttggcggtggcggacgctatgaccatttgcttgccaaattcggccgtcctggtcctgcgactggcttcgggttgcgtttggatctgcttgcggaagcagtaggcaaactagaagtgcagccgaaaaagcgttgcttgctttatagcagggaacggcgccaagaagcctatcgaaaagcgactgcgcttcgggagaaggggatgcaagtcgtcttacaagatgtggcaggcgttgacgacatcgataaaatgtccgctagttatgaagaaattgtttacttaatcggcaaaacagaggagggcaagcgatgacactgacaatggcgatgccgaaggggcggatttttgaggaggctgttcagctgctccgttcggctggctataatttgccaagttcgtttgagcaatcgcgcaagctcattatcgatgtgccgaatgaatcgctccgttttatcttagcgaagccgatggatgttcctacttatgtggaacacggtgttgctgacgtcggtgttgctggcaaggatgtcatgttggaggaaaagcgtgatgtccatgaagtgctcgacttgaacattagcgcttgtcatttggcggtggcggcgctgccgacgtaccaacgaggcgaattaaatccaaaagtagcgtcaaaatacccaaacgtggcatcgcagttttttaaagaacaaggggagcaagttgagattattaaattgaatggctcaatcgagttagcgccgatcatgggacttgccggcagaattgtcgacatcgtgtcaacggggcaaacgctgaaagaaaatggcctagtcgaattggagcaaattagaaaaatcacgtcgcgctttattgtcaatcctgctagttaccggatgcgcgccggtgaaattcatgatatggttgagcgtttggcgactgttatagagggggatggcagtgaagatcattgagctaaaagaaggagaggcggtttccttaaagcgcagcgggctccatggaagcgaagccgaaatcgccactgtgaacacgatcattgaaacggtaaaaaaggaaggcgatcaagcgttagtcgattatacgcaacaatttgatggagtggaattaacagacttgtgtgttacgaaggcagaattggacaatgcttaccgccacattgatcaacccgttttggcagcgattcgccaagcaattgccaatgtccgtgcttttcacgaacaacaaaaagcgaagtcgtggtttcaaacagcccctgacggcacgattttaggccagcgcgtcacacccctcgatgcagtaggcgtttatgtacctggaggaaaagcggcttacccgtcttcgatcattatgaatgttgtacctgctcaagtcgcaggtgtaaaggacatttcaatggtttctccatctggcaaaaacggttcccttccgccagctgtcctcgcaacagcggctgaacttggcgtccatacaatttataaacttggcggagcgcaagcagtggccgctttggcgtatggcacggaaacggtgcgcccagttgataaaattacagggccaggcaacaaatatgtggcccttgccaaaagagctgtttttggcgatgtggccattgacatgattgctgggccaagtgaaatttgcgtgttagccgatgaaaaagcgaaccctgcctatgtggcagcagaccttctttcccaagcggaacacgatgaggatgcgacagccgtgttagtcactccttctagggaactggccgaagcggtccaacaagaaacagcacggcaattggctactcttccgagaaaagagatagcagggcgagcattagaacagtttggcgctttgtatgtgactgcctcgctggcacaagccattgaagtcgttaaccaattggctcctgagcatttggaaattgcgacagaggagccgctagcattgcttggtcgcgtcaaacatgcgggagcgatttttcttggttcgtacagtgccgaaccagtcggcgattattttgcaggtccaaaccatgtactaccgacaaacggaacagcccgctttgccagcccgctatcagtagatgatttcgtcaaaaaatcgagcattatttcctacagtaaaacggcgctagctgagaacggaaaagcgattacggaattggcccggctagaagggcttgaagcgcatgcacgcgcgatagacattcgattggaggacatgtgatggctcgtagctatgaattaacaaggacgacaggagaaacggacatttcgttgcggctcaacctcgacggcgaaggaaaagcagatatcgaaacaggcgtaccttttatggagcatatgctcgatttgtttgccaagcatggccaatttgatttgtttgtcaaggctagtggcgatattgaagtcgatgctcatcatacgactgaagatcttggcatttgcatcggtcaagctgtaaaagaagcacttggaacgaaggagggcattaaacgttatggaaacgcgtttgtgccgatggatgagacgcttgcccaagtggttgtcgatttgagcaacaggccccatttggaatttagggctgactttccgagccagaaggtcggcacatttgataccgaacttgtccatgaatttttttggaaattggcgttagaagcgcgcatgaatctccatattattgtccactacggacacaatacacaccatatcattgaagcgatttttaaagcgtgcgcacgtgctttggatgaagcaacggcaattgatccacgaattaaagggatattatcaacgaaggggctgctttaatgattggcatcattgactacgggatgggcaatctccattcggtctctaaagcgcttgaaaggttagcgatcccctattttattagcagcgacggggaagaattggcaaaagccaaggcgttgatcctccctggtgtcggcgcttttcctgatgcaatgaatattcttacacaaacaaacgtccagccttttttggacaaatgggtagcggaaaacaaaccattactcggcatttgcctggggatgcaactcctgtttgaatcaagcaacgaacatcaaccaacagcaggtcttggttacttgcctggacgcgtcgaacgtttttctggaacgacggcagaggggcacgcctacaaagtaccgcatatgggatggaataagcttgaattccataggcccacaccactgacagaaggtgttcctgatggctacgtgtattttgtccattcttatgtcgtccgtacaaaaacggacatcgtcgttgcaagcagtgattattaccaaagtgtccctgctattgtgcaaaaagggcaagtgtatggcatgcagttccatcccgaaaaaagcagcactgtcggcatggcactgctgaaacgctttggccaactagtggagggaaattgagatgagctatacgatctatccggcaattgacatccttgctggaaaatgcgtgcgcctcgaacaaggcgattataacaaagagacaatatatggagaatcgccttataaaatggcgaaatcatttcaagacgcaggcgcgaagtgggtacatgtcgttgatctagacggggcaaaagccaaaaggccggtgaacgatgaagcgattttgacgatcgcccaaaagttagacgtccccgttcaggttgggggaggaattcgcaccgaacaagatatcgaccgctatataaacggaggcgtcgcccgtgtcgtccttggcagtgtggccgtttaccagcctgattttacgaaacaaatgcttgccaagtatggagaacaaatggcgatcgggattgatgctcgtgatggatatgtagctacagaaggatggcttgaaacgtcacacgtcaaagcggaagaccttgctgctgaaatggcccgctttggcgccaaaacgttcatttttaccgatattgcccgcgacggcatgctcacaggaccgaatatcgaagcgtgcgttgctctttccaaggcagcgaatgccaatgtgattgcctctggaggggtaagcagcattgccgatttggcacaattgcgagctgcttctcttgctggtgctattgtcggcaaagcgctgtacacgaagcggttcactttagaggaagcgttggcggaaggagagctgtaatgctagcaaaacgaattattccatgcctagacgtgaaagaaggccgcgttgtgaaagggacgcaattcctctccttgcgcgatgctggcgatccagtcgaactcgctgctttttacgacaaagaaggcgcagacgagcttgtgtttcttgatatttctgcttcccatgaagggcgggaaacaatggttgacgtggtccgcgaagtcgctgcaacgctggcaattccttttaccgttggcggaggcattaacacgctcgctgacattcgccgcattttgcgtgccggcgcagacaaagtgtccattaacacagccgctctgcttcgcccggcatttattcgcgaaggcgctgattattttggctcacaatgcattgttgttgcgattgacgcaaaatttgatcaggcgcttggcacgtggcgcgtgtatacacatggtggccgcaaacagacgaactggttagcaaccgattgggccaaggaggctgtccgcttaggggccggcgaactactcgtaactagcatggatcaagatggagcgaagacagggtttgatttgccattattaaaagcgatcaatgaagtagcggcagtgcccgtaattgcctctggtggagctggagcggcaaacgattttgttgacgtgttcaaatacaattacgcagatgcagccctcgcggcatcgattttccattacaaagaaacgtcgattcaagaagtaaaagcccgtttacgggaagaaggtgagtgcatccgatgaaaccaatccgttttgataaagacgggctcgtcccagcaatcgtccaagatgcaaatagcaaagcggtgctaacgcttgcttatatgaatgaagaatcgctgcaaaaaacaatggaaacgaaagaaacatggttttacagccgatcacgccaacagctttggcataaaggcgaaacatcaggcaatacacaacatgttgttgacgtccgctatgactgtgaccaagacgctgtacttgtacttgtggaaccgaaagggcctgcttgccatacaggggcatatagttgtttttcacagtcgctaactggcagtactagcaaggtggaaggcgatcgctttcaaattttaaacgaccttgaagaaacgattgcaaagcgggaggcagaaatgccagatggggcgtatacaacctatttgtttacagaaggtgtcgataaaatcttgaaaaaagtcggcgaagaggcaggagaagtaatcattgccgcgaaaaaccgcgaccccgaagagctgcgttgggaagtagcagacttgttttaccacgtcctcgttctcttacaggaacaaaagcttcctttggataaagtactggaaacgttggaagcgcgccaccaatcataagagcatgtaaaaaaaacagcaacctggttacttaggttgctgttttttagaggaaactttaacctttataagaaggaaagcaaaaagggggaagacaaatgtctgacatagcgctcattcgaaaaatagaagcgttatccatgaatgcacagcctgccctgaagacagtgcagcaggacggatggattttgcgctttgccaatggttatacaaaaagagcgaactcgattaacccgctctatccttcctgtgaggagcttgataggaaaatagaggcttgtgaacaaatgtaccgtaagcaacatttgcccgccgtttataaactgacagcggctgcttttccaggcgagttggatcgttctcttcatgcaaaggggtatgattatgtaggggagacgagtgtgcaaatcttgtctttatcacaaatcggcgaaaagccagaagcttatgttgagatttgccccagacaagaccgaaaatggtttgatcattattgtcgttggaatcatgtttgcgaagcagaccagcagacattaaaacaaatgtttgacaacattgccgccgagacgtgctacatgcttataacggacaaagacgggatcccttgtgcttgcgggttaggcgttcttgaggacgagtacatcgggttatttgatattgtgacaaagaagaaggaacgaaaacaaggatatgggacgcagctgatccaacatttgcttcattggggaaaagaaaatggggcagcctttgcttacttgcaagtggttcgtgaaaataagccagccctcgcactctatacgaagcttggctttgaagaaatgtatacatactggtaccgagtcaaaagctgagaatagcgatgttttaatagattaaactgggctcgttggttttattcagtaaaagctggctagcgtctactcttaatcaatgaaatccttaagtttcggtgaataccctttctccgaaagaaacgagtctgcttggaagtgccgaaccattagctgctgtagtgacgatggtcatttggctccgtgaaccgttcggtgtttttcaatggggagggctcgcttgtattcttgctatgatttttataatggcatggcaaaaagaggatgtggaggcccaggcatagagaggttctcatagcgcaaagcactccctattggctgcgaacggtacgttttaaacagagggagaacggctacactggtggtagagcataagttagcaggcgaatgtgcttgctagatcgttaacgaacccacgtatgaaaggagaaggtaacagtggccagtgaaaaggaaatcccaaaagaagcagggatagataacagtgtagccgtactccgagaagggtatttatatggcacaaaccgagcccaagcatttcaatcggatctttttaaaacacgcttgctagggcaagaagcgatttgtatacgtggggaggaagcagccgaactgttttatgataatgaaaaatttaagcgagcaggcgcggccccaaaacgggttttaaaaacgctatttggcaaaggcggcgttcaagcgcttgatggggaagcacaccatcatcgaaaagcgatgtttatgtcgctcatgtcgaaagaaacgctagaagacattcgcgctattgcttcaaaacaatgggaacgagccgctcaaagatggcagaaccaatcaaaagttgttttgtatgaagaagcacaagaagtaatgtgccggactgcgttcgagtgggctgggattcccgttgaggaagacgaagtgaaagacaaagcggagtggttccgcgccatgattgaagcgccagcggcgatcgggccagcccattggaaagggcggcgcagccggggcaaagccgaaagttgggtgaaagagcttgtagaggatgtccgtacgggcaagcgacaagcagcagaaggaaaaacattgcatacgatgtcgttccaccgcgaattaaatggcgaatggatggacgcgcaaacagcagctgttgaaatcatcaatatcctccggcccattgtggccatttccatctacatttgcttcacggcactcgctgtccatcaacacccgcaagaacgggaaaagctcggatcagacgaagaaaaattacagcattttgtccaagaagtcaggcgattctatccatttttcccttttgtgcctgcgcggccaattaaggattttacgtggaatggctacccatttaagaaaggcacattagtgcttctcgatttatacgggaccaatcatcatccaaagctttgggacaatcccgaacagtttcggccatatcgctttgcgacatggaacaaaagcccgtttgcctttattcctcaaggtggaggcgaccgcaatgtcggccatcgttgcgcaggcgaatggatcacaatcgagattatgaaagaaagtttggattttcttgtcaatcgaatcgattatactgtgcctgaacaagatttacgtttccaatttaacgaaatgccagctttgccccatagccattttgtgatgacgaatgtccgctttcaataaaagtgtgcctctttaatcgcggattaaagaggcacacttttttatctgtcagccccattatttgcgagctttataatgatggaagcagtcgcgctttaacattatgcttaaaaagaaaggcgaaagcgggatacagcctccgatttttcaagcaacggataggaaatggacacaaaattttttcaaaacaacttttttaacggttgtccttacagaaaatcacgtttagtgtatacttgacgatagatagatcatttgcttggagggacaagcttacatgagcgacgaatcgaaagaagattcaaggaccatcgttccgttttaccaaaatggggattatttttttcacaggggattgcaagcttttcacaaaaagcatttaaatcgggctgcaaaactgctagagcgggcagtgaagcttactgccactgaaccgatttttaaaatacagttggctgcagtgctgtccgaacttggtgagtatgggaggtcgaatgaactcttacaatccgtgctggcaagttccggcagtcaacagcctgtttgtcatttttttattgccaataatgaagtgtacatgggccacttttatcaggccgaaaagcatgtgcgtctctatctagaaaaagagccaaacgggcagtttgccgaagaagcgcatgaattgcttgagctatttgaagatgacccttttatggaggaagaagcgagttcggaacaatttttagacgaccatgaacaggcatggctttttttgcgaaaagggcaagcagagctggctgtgccgttgcttgagtcaatcgttagcaagcatcctcgtttgtgggctgcccaaaatcatcttgccgaagcgctattttgcatcggtgaaaccgaaagagcgtttgccatttgccaggaagtgctcgataaggattctggcaacttgttggcattatgcaatctcgcattattttactttgaaatgggctatactaaagaagcgaaatggtaccgtgagcggcttgcaagcgtttatcctcttgattcaggtcacgctgcgcgccttgtccaagtgctatgtgctcttggaaattataaagaagtcctttcacggccttttcctattgatgctgatgaagaagcagcccttttgcggtgttacggtgtcgcttcctaccatgaacacaatgaaaaagccgctttagaacatttgaaaaaagcggtagatcttggcgacggagcttcgaaacagttaatggaagcggtggccaacaaacaatcagacgatatttcgtttacattgtttgccgaacgtggcttcttgagcagaacattagacagttagctgtttttttcgctacgatggaagcagataaccttgaagagtagaggagtgcaagaaacatggctgaagagaccatttatgatgtgattattgcaggagcaggaccagctggcatgacagcggctgtgtatacatcccgggccaacttaaatacactcatgcttgagcgtgggatgcctggcgggcaaatggcgaatacggaagacgtggaaaactaccctggttttgaccacattttaggtccggatctttccaataaaatgtttgaacacgccaaaaaatttggcgctgcctatgcgtatggcgacattaaggaaattattgatgaaggcgatacaaaacgggtcattgctggctctaaagaataccgcgccaaggcagtcatcgtttcaacgggagcagaatataaaaaacttggcatccctggcgagcaggaactgagcggcagaggcgtttcctattgcgctgtgtgtgatggtgctttcttcaaagagagggaattgatcgtcgtaggtggcggtgactctgctgttgaagaagctgtctatttaacacggtttgcaaaaaaagtgacaatcgttcacaggcgcgatcaattacgtgcccaaaaaatcttgcaagaccgcgcttttaacaacccgaaagtcgatttcatttggaataaagttgtaacggagattaatgaaaaagacggcaaagtcgggggcgtgacgctaaaagacacgaaaacaggcgaagtctcaaacatggaagctgacggtgtgtttgtatacatcggcatgttgccattaaatgaaagtgttcagaacttagggattacgaatgaggaaggctatattgttacgaatgaggaaatggagacaaaagtgcctggtatatttgcagctggcgatgtacgggaaaaatcgctacggcaaattgtcacagcaacaggcgacggctccattgccgcccaaaatgtccagcattatttagaaaacttgtctgaagctgaaaaagtcgagaaataagcgtagttcttagagtgaacaagaacgaatttgctttaaaggggtaaaccgtcatcagcttttaaaggtgctgtaatgcaattgaaataacggttcctttataatagaaacagtaattgacccccttttttaaaatatagcttcatttaggcgcagacttctgcgccttttttttggttaaaccgaacaaaataagcgccatcattgtcgcctcccttaattacttgtatactataaaatgaggaacgcgaggtgagaggcttgcagcgaataaccaattgtatactggcaacagcggatcaatgtttaatgcttcaaaagccaagccgtggctggtgggtagcgccaggcggaaaaatggagcatggcgaaacgattaaagaagctgttgtccgtgaatttcgagaagaaacaggactatccattaaagaccctgaattgcgcgcagtgaccacggtggtcattgtaggtgaggggcaaactatggaagatgagtggatgatgttctcctttcttgccagcagctatgaaggcacgatgctcgatcagtctccggaagggaagcttgtctggcaaaagcgtgatgctcatgcggatttgccaatggcagaaggggaccaccatgtctttaaccacattttaaatcaaaaaggcgttttatacggaacgttttattatacaaaggattttaagctgattgattatcgacttgatccgaaaccgatgcaagagaaaggggcagcactatgaaccagtctgaagtcgagattgtcattattaccggtatgtctggcgctggaaaatccgttgctgtccgaagctttgaagatttaggctattattgtattgacaacttgcctccagtcttgctgccgaagtttattgaattgattgagggcggcatcgataaagtcacaaaagtggcgctcgtcatggatttacgagggcagtccttttttgatgaattgttcaaagccattgatgaactgaatgaaacgccggcaagtagacttaaaatccaaattttgtatttagatgcaaaagattctaagcttgtgcagcgctataaagaaacgaggcgtacacacccattagccaaagggggcttgccactcgaaggcattcaaaaagagcggaatttgcttgaagaaataaaggggcgcgctcagcaaatcattgatacgacagagttaaagccactccagctacgggaaaaaatcatgcagcgttttgctgggaatgaccgccaagcatttgctgtccattttgtttcatttggattcaaatatggcattccgattgatgccgacctagtatttgatgtccgctttttgccgaacccgcactacgttgaagatttgcggccaaaaacgggattacagacagaagtgtcctcttatgtgttaaaatggaaagaaacaaaacaatttgtggagaagctgactgatttatttgactttatgcttccccattacaaacgggaagggaaaagccaagttgtcatcgggatcggctgtacaggcggccagcaccgttcagtgacattggctgaatacttttgtgctcattacgaagctaaatatgatgcgtatacgagccaccgcgatattaacaaacggaaggcgaacagtcgatgaaaaagaaggtcgttgtcataggaggaggaactgggctttccgtgattttgcgcgggctgaagacgtttccagtcgatatcactgcgattgtgactgttgcggatgatggcggtagctccggcattcttcgcaaagagctcgatattcccccgcctggggatgtgcgcaatgtgcttgtggcccttgctgaagtggaaccgcttgtggaagaactgtttcaacaccgtttttcaagtggagacgggctaagcggacattcactcggaaatctgctgctagcaggaatgacatccattacaggcgattttcaaaaagggatttcggcgataagtcgagtattgaatgtgagagggcgtgtgcttccagcagcaaacgagagcattgtccttcacgcggaaatgcacgatggctcaattgtctcaggagaatcaagcatccctcttgcagctaaagggattaagcgcgtttacttgtctccagaacatgtctcgcctctacctgaaacgcttgatgccctccatgaagccgatttaattgtactcggccctggttccctctatacgagcattgtcccaaatttgcttgtccctggcattaaggaagcaattgctgcttctaaagcgaagaaagcatatatttgcaatgtgatgacacaggcaggggaaacagacggatacagcgcttctgaccatttacaaggcctgtttaagcattgcggcggccaattggttgagtacatcttagtcaacagcacgacaatctctgaaagcgtccgctctctttatcgcttagaaaaagcagaacaggttgtcgtcgacagtgatgtccttgaatcaatgggggtgacgcctattaaaggccgttttgtccttgaggcgaatcaaaaattgcgccatgatgcgatgaaggtgtcaaaagcactaataagtttgctggaagaaaaggaacaacaaccgacatatcgggaacgaaaccggtgttagggcggcttttatgccgcccttcatgaaagagagggtgagaggcgtgtcttttgccgcgaatgccaaaaaagaactgacacagcttgagcttgtttcttgctgtgctcgggcagagctttctgccctcatccggatgaacgggtcgctgtcgcttggcaataagcaagtcggtttagatgtaacaaccgaaaatgcagccattgccagacggatatacacacttatcaagcatctataccctaatatccacattgagttgctcgttcaaaagaaaatgcgtcttaaaaagaataatgtttatatggtgcgcatttccaaagaagcgcgccagctacttgaggatttgcggattttgaacgggtcttttcaatttattcgtgacatttctccggaaattgtaaaagagtcttgttgcaaacgtgcttatttgcggggggcttttttagcaggcggctccattaaccatccagaaacgtcttcttaccatttagaaatcttttcgctttatgaagagcataaccaagcgatatgtgaactaatgaacggattttccctttcagctaaaacgcttgaacggaaaaaaggatttattacgtacttaaaagaaagcgaaaagataacggaattcctgaatatcattggcgcccaccaagcacttctttattttgaagacgtccgcattatgaaagatatgcgcaactctgttaaccggcttgtaaattgtgaaacggctaatttaaacaaaacggtcggggctgcccttcgccaagtagaaaacattcgttttattgataaaacgattggcttggaaaacttgccgcctaaactacaggaagtcgctaagctccgagtgaagcaccaagatgtgacgttgaaagaactaggggaaatgatgcagggcgggaaagtgagcaaatcaggtataaaccatcggctccgtaagattgacgaatttgcggacaagctccgtaacggcacgtttgatgccaaaaaattaaatacgcatagggggaaatgaggaatggcgcaaaaagaagtaaccatccaacttaaatcaggtttgcaggcccggcctgcggcgatgtttgtccaagaagccaatcgattttcgtctgaagtgtttattgtaaaagacaatgccaaagtcaatgcgaaaagcatcatgggattaatgggcttggcactcggcaaaggcacgacgatcacgattgtcacagaagggcacgatgaaaaagaagcactggatgccttggttgcttatgtggaaaacgatgggtagacggcattttaaaaatcgactcctagcccctagctcgtaacaatagaggtgggctacagaaacgtgctattccttgtgattgccgaatggaacgaaagcctcttctcgagcaggtaaaggcatgagaggacgagtggtatagaaacataaaagccagttgagcacatgcgctcaactggcttaagctgcgttaacatggttaactggtttgtggtttcgattgtttaaacgggtgtagctttctttcaatccagcccattaacatgtctgcaataatcgccataaaggcagttggaatggcaccggcaagaataatcgccatcccatctgtggcgtttgtccctgtcaaaatgatttcgccaagcccgcctgcaccgacaaaagcgccaattgcagcaatgccaatcccgacgacaagggcattgcggaggccggccataatgacgctaatggccaatgggagttcaaccatgcgcaatagctgaaaacgtgtcatgccacttgcacgcccagcctcaacaagagcttggtcgacacctttcatgccgacatacgtgttttgtgtaatcggcaaaatggaataaagaaataacgtcatgacagcagtgttgggtccaaggccgaggacgagcataatgacggcgatcatgccaagagcaggaatggtctgaatgatgttcccaacagccagaacccagccgcttaaacgcccatatttggcaatgagcacgccaaggggaatcgatacaatcgctgcaaaaaggacgccataggcagccataagaaagtggcggtaaaattgtgccgcaatgtagccgctgttttgggaaacgtatgtgatgaattcctggaacgtgtccattagtggctttcctccttgtccttaaagtaattgttttcttctaaaaaggtttgggcaacaaggcgcggattttttaattccacgtcagccatatagtttaattcttgcattttttcagtcgtgatggtgccagttaagcgttctaaaagcggcgaaagctctggatattgttcaagcacctcattgcgtacaaccggcgaggcatcgtaaggcgggaaaaaccgccggtcatcttcaagcacttttaaattgtattcctgaatacgcccgtcggaagaataagccaatacaacatccatatgcccgctagcgttggcttcatatacgaggccgacattcatcggaaacacgttgccaaaagcaaaatagctttcttgaaaaccttggtagccatcgcctttgcgattcacccatgaattatcgacgccaaaacggagttccggtgcaaaagcttccaagtctgaaatcgtttcaattccatgctcatctgcaaatgcttcggtaacagaaagggcgtacgtattttcaaatccatatgaatcaaaccaagtttgatcgaagcgctcagaaaattctcgtttcacgatgtccattgcttcgtctcggtcagtaacagggtccatgccaagtgccgcagacaagtctgtacctgtatagcgagcagccgtaatgtccaagtcaccttgtacaagcgcttgatgctggacgacagaagagcctagtttcgtaattaactcggtctgcaaatccgtttcttcttcgatcaatagggcgacgatttgccctagaatttctgattcgcttgtcaccattgtgccaatccggattgtttgctgggaagggccagatagtcccggcaaagaacacccagttaatataagccctgaaaggcaaaaagcaatgatcgtttttgttggcttcacagtgattctcctccccccttaagatgtttgggattgtttgtagccttttggcgttaatgcacgctctactaacagcagtaagcggtcggcaagcagcgccaaaatcgtggcaggtaaagttccggctatgataagcgctggttggaataaattgaggccgtcaaaaatgaaatcccctagcccgccgccgccgacaaatgccgctaatgtagcccagccgattaaatagacagttgctaaacggatgcctgccataataactggcaatgcaaggggaatttcgattttaaaaatcgattcgatattgttcatacccatgcctttgcctgcttccaacacgcttggattgacgcctttaacacctgtgtaggtgtttcgtaaaatcggcaatacggagtaaaaaaacaaagcaataatggccggtactttgcctgctccaaaaataggaataaaaaaggctaatatggcgaggctggggactgtctgcaaaatgccgatgacagatataagcctgtctgccacacgaggaacacgtgttagggcaattcctaaaggcacagagacaagaacacctaagagaatcgccgtaaacgaaataaacagatgttcccccgtcttaaaaagcaagtcatggccgtattctgaaaaaaacgcgatcatcgtttatcctccttcttgggtcgcttttaaaagcgctgtacgacacataggcacaacacacaagcacaatcgactcacggttctgtgggctcatcaaagtccatgccatcgccccaaatggtgtcatagacaatatccgccaaactggtccgtgtcacaatgcctgcaacttggtgttggtcattgacaacgggcacatatttggcaccgcgccgcagcattttatggatcgtatcacgcaaaaggctatgctcttgaacggtaaaaacatctgtttccattgcctctttgacagtcaatgcttttttataaaaggaatcgatcatttcgacgtcaatgtagccggttaaaacgttatcctggttgacggcaaggagtgagtcgacacgcttatcgcgcatgagggagatggcgttgcgcagtgtttcattttcatcgacggtaacggcgtgtttattcataacttgttcaacagtggttacatcagcccgtccttgaatgaggcggtccttgccgataaaatcttcgacaaaggcattggcaggggagcgcataatctcatcaggagttccagtttggatgatttttccgtctttcatgatgacaatccggtctgctagttttaatgcttcgtccatgtcgtgtgtaacaaaaacaatcgttttgtcgagatctttttgtaattttttgaattcctcttgtaaagagtctctcgtaatcggatcgagtgcgccaaaaggttcgtccattaaaatcagtggtggatcagctgcgagtgcccgcaacacaccaattcgctgctgctgtccgccacttagttcgtgtgggtatttgtccaaatacgactctggcaaattgactagtttaatcagttcttttgcccgctcgtcttttttcgatttcggccacttcaaaagcgttccaacaaggacaatgttttctttaacagtcatatggggcattaacccgatttgctggatgacatagccaattgatcgacgcaattcgactggatcttgtttccgtatgtctttgccgttaacaataatttgcccttctgtcgcttcgtggagacgattcaccattttcattgttgttgtctttccgcaaccacttgggccaataaaacaaacgaattcgcctttatttatttttagatttaaattgtctacagctggtctgccggcaccataccgctttgtgacatttttaaattccaacaaaacgcccacctccatgtcgaataatgtaaatttaccaaataagtataagtaaaaacaagtcgattcgtaaagccttataaatgttaaaaaatatatgcaatatatactgcacaaaatttgtagtgtgttttccttccatttgctttgtttttcttccgaattctacccattatggtttctagtcgtttacagagaggctcaaacacgggaagtacagcggtgagacgaaaaaagaattgtatccttttccatttgagcgtatagtaaaggtaaggataaggagagatgacaaatggccaatgaaattattgattaccgcgaatatgaaccagacggaagcgagcgtatgttggcgatgttgctatatgtattgagctttcctgcgcctatccttgcgccacttattatctggctcgttaaaagagatgattcggactttattgattaccatggcaaggaatactttaactttttgatttcttttttcatttacggattagttgcgagtgtgaccatgattatcctaattggctttttacttgcgccacttgtcggcctgcttgctattatttttaccattttggccgcaattaaagcataccaaggagaggaataccgaattccccttacaattaaatttttacgttaagcgaaggcatcccataatgagggatgccttaaggttgtcgacaaagtcgataactgagatcagactgatagaaaacgcttgtcagacgaggagtgcaggcgagggaagatgcgaatagaacgtgggttcatgagcatatgactgaggcaaacgacgacgtatgcgagcgtttgcctacagtctggaggcatcccataatgagggatgccttttttattagttctgtccgacagcatggataacatgggctgtacagcgaatgccgtttaaaaagtggcgaatagcgagattttcatttggcgagtggttgcgttggtcaaagtttgcataagggacgagaagagatggtgcgtgaaggagctttgtccatacatagtctggcagcgagccgccaaggcttggttggataaggggctcctcattaaaacaagcagaaatgccttttagcgctttttggacgatcgctgtctcaactggcgtacgggaaggctccattgcccctaaaaacgtcaccttggcatcaggccggcgtgcttttacgtgtgcagtcaccttttcaaaaatgtctttagggtcctggtccacaacgaggcgtgcgtcgatttttacactggctttgctaggaataattgtcttaatgccatcttctaaatagccgctttttagtccgcatatattaaaagtgggttctagcgctagttttcggtaatagctttttccatctatatccaaatggggatagccgattttttgggcgactgagtctttttcaaaagggagtgtggccaacagctgttcttcttcagcgctggcagggcgaatattgtcgtaaaagccttcgattaagacgcgcccgtctgtgctgcgcatcgtctgaagcagctccataaggtcccaagctggatttgggacaatgttgcctgtattgccagaatggttgtcgaactcggcgttttgaagttcaatctcaaaagatagaatgccgcggacgccaagaaggacaaggggagagccgctatcatgagatggcccatcagctgtgtaaacgaggtcggcttgaagcaattctttgttgctttgaacaaagtctggcaaatggacgctgcccatttcttcttccccttcaataacgattttaatgttgacgggtaaagcgccacatgcttcttgatacgtttttatgccgagaagttgggcaacgatttgtcctttgttgtcgcctgcgccccgtgcaaagatacgcccgtcgcggactgttggttcaaatggaggcgtctcccactcacttaatgggtcaggaggctgtacatcgtaatggccataaattaacaaagttggcgcgtgtttgtctgtaagaagttcaccgtatagaataggatggccttctgtttcaaacagttcagtacgggcaccaacttcctccatgagcgctcgcattaacgctgcgcattcgcgcattcctttgttttgagtgctaatgctttcttggcgcaatagtttaaacaacgtagccaatgaatcgtctgtttgcttggcgacaatgtcgtcaattgctgaaatgctcagaataaattcctcctaatcttaggcgaaagcaaaaaggctagcgccatcttgttttttaaatcgtaccatggcctaatgaaaaagggaattgaatgagggcaggctgcaactggcggcaacaaaaaagcttccgcgttttgcggaagcctttgtctgttatttcgttggtgtttcaatcactttgtcgattaagccgtattcttttgcttgttcggctgtcataaagttatcacggtctgtgtctcttgcaattcgttcatacggttgaccagaacgttctgccataatttgattgagtttttcgcgcatttgaatgatgcggcgggcatggatttccatgtctgcagcttggccttgcataccgccaagtggttggtggatcatcacttcactatttggcaatgccatccgtttgcctttcgcaccagcagtgagcaaaaaggcgcccatggaagcagccatgccgatgcaaatcgttgaaacatctggtttgatgaattgcatcgtgtcatagattgccattccagcagtaatcgagccgccaggagagttaatgtataaggaaatatctttttcagggtcttctgcttgcaaaaacaacatttgtgcaacgatcgagttggcgacattgtcgtccaccccgctccctagcataataatgcggtctttcaataaacgggagtaaatgtcatatgcacgctcgccacggtttgtttgttcaattacggtaggtattaaattcatcgctcttcctcctcatgtcctattgactaaaatccttgaaattgttgctctgtaatcatcatactgcaaaggtcaataaaggtcaaatgagttgcttctttttacaaaagtatgtacggcaacaacaaaaaagcagtttcattcatgtactattccttgtgatgatcaaaaagcccttctttcatgatagactaaattataaagatgtaaacctctatgttttacgccgttcacaacgttgttttttattttttaaaagggccaaaagagctaggcaactgctgaaatctataagaaagcgtttacattaacaagccatttggtttatgctatgacatgtagaggaaaaagagcatttaagttcgcctgagcggaatgtaaaatcaaggcaaggaagttcgaggaggggttgaatagatggagattggcttactgcaacgtcagacaacgagtttagtgatgacccaagagttaaggcaagcgctccacttgctacaatattcgtccgtggatgtcattgcctatttgcgggaacaagcgctagaaaatcctctactcgaattacatgaacaatctactctttcccgtgaacgggaactggttggcacaaggccaatcaggcaacagatgtcaagtgacgacaaacaggcagcgttgcaaaatgttgcgcaaagagggcgaacgcttgctgatgagttgtacgaacagttgattgaatcgccgacgctgagcgaaaacgataaatgcgagcttacttatttgattggtaatttacgggaagatggttatctaggagaagcgctgcctcagctttgtgcagaccggaacatcactgaatcggaaggggaaaggttgctcgccatattgcagagttttgagcctgcaggcgtaggggcccgttcccttggggaatgcttggccttgcaacttaaacgtatgcccgattgccatcctcttgcgattgacatcgttttaaaccatctcgaagcgctagctgcccggaaatggaagcaacttgcgaaacaatacggcgtcgttgttcaagatatacagcatctatacgaccaattaaaggagcttgatccaaagcctggactacgttattcgaaggaaacggccatttacgtccagcctgatgtgctgatggcaaaggacgaatctggaaaactgcttgtcttcatgaatgatgacatactacccgcgattcgcgtacacgaggaatatgaccatttactgaaacaacaagtcgagacaagcgcctatgcgaagcaaaaaaggcagcatgtcgagtggttaaaacgcagccttgaacaacgccagcaaacggtgcgtcgcgtggcggaagtgttggcgagcgtgcaagcagactacttgcttcagcctagtggggtgctcaagccactgacgttaaacgatgtggcccaagttctcggcatccatgaatcaacggtaagccgggcaacatctaataaatatgcacaaacacctcgtggcttagtcgaattaaaaacattgttctctggccatgtttctaagtcagatgcccaattgaccaatcaccacgttaaagtgtggcttaaagaaatgattagcgtagaggataaaagcaaacctttgtcagaccaaaaattagcggagcagttgagaattgataaaggagtagctttgtcgcggcgggtagtagcaaaataccgcgatgaactagggattttgccatcttcgaaacggaaacgctacaacgaaaggaccggataatgaacgtcgatttttatacgaaaaaagggtgtcccttgtgcgacaaagggtacgcattgctgaaagaattagccgatagttactcgcttgtgattcaatgccatgacatctatcaggatgatgtgcttttagagaagtaccaacttaaaatccctgttgtttgtatagacggccaagaaattggctacgggttattagagaaagagtcgctccaaaaacagatcgaacgcattcgttcaataaagcaataagcatgtgcaaatttgaaaggcaacgtttatctgacaacacatcgaaaaacacaaagactgcctgttcccattcaaaggggataggcagtttcatgtcaaggatcgaaagggtgcagatgtagtaaaaaagagaaccgattggctctctagtaacattaaacgtttagctttgccttatgaatggaagtaatatcccctttatcacggtcgtcaatggaagtaatgtcgcctttatcatggctgtcaatgaaagtaatgtcccctttatcgcggctatttatttcactgtcagcctgtgtgtttgtaaaaacaacaaatgttgctgctgcgatgaaagagacgacaagtgaaacaaccaactttttcttaaacaacggaatcaactcctaaagtatgttggtataagcgtgcaccatgggccactttcatatatttcaatgccagtctcgtatttccttccttttctgcaaagtgagcagcttcttcagcaagttcactcacctcaaagtccattccttctttttggagctgtgcgatggcttggtcaaccaaatcatagtttttatcgatgtgaaggccttccgtaaataagcagcgtgcgttgtattctttgcttttgtagtaggcggcacctgcttttgcaatttggaagtgtgggagagcctcttcgatttttccttgattaaagagcacgttgctcaaattgtatctagatttggcaccgaaaatggtgtttttgtgctcagggatgtcaagcgctcgtttaaaatacgtttccgcctcgtcaaactttttttggccttgcttgtttaaacctagcgtccgcaacacttgtccatatacaattggaatgcctttagcacgctctagcgcctgttttaagatggcttcgcctttttcagggttgttcaactcttgatgaatacaagcagtgatgatttggcagtttatcgctggctcatgatattgaagccgatcgaataggacgtttgcttgttccatgtaggacgaagcaatcaaatagtggttgagacgataataaacaaggccaatatattgataaaactccgcttcctccgcctcgtcgtttacgtattctagtagtcgttcggctttgcgaaacagctttacagcggaccggtaccgttcttgcgtaaactcgtattggccgctaacaaagtaatagagatacttgagaaggtgatcgatttcggtcttttcagaaatcggttctatttcctcagggcattcgtttttatcgtaacggctgactaaaatctggtgtttaaattcgactagtgagtagaaggccataaacttgtcgcttgggtccatcgctggtagaagctgtttgacctcttcttttaaaataatcgcctgttcatatgacttagaaagaaggcaactataccattctgcaatctttgccccaaccgattcagaacgtatcgtcctccccataaaaccaacctcctaatgaatcccattaatattcatataatagcaaagaaaataggacttgcctactattataagaattttccccaaagttataaaacgttatctctgaaaacaaaataggaacatgtccttttgccaatcatctggattttgataataggcttgccattatcaaacggaggatgttttagttgtctgttttcgacttccttggtacaatacaagtgtagtaaatgtttttgctctaaccgggacataatatgtctgcgagggacgttatatgtcccgataaacggaggaggtgttacatgcggacgcttattaatctgcaaagacagattgttcccgaattaatggaaacaatggcgaagcgttatcgcttgctgcaatatatccgtttaatgcagccaatcgggcgcagaagcctagcaaccaatttgcaaacctccgaacgtatcgtccgtggggaagtgacgcttcttaaagatcaggggctcattgaactgacgacggcaggcatgcgcctaactgaagcaggcgaagcgttgtttttagagcttgctgatatgatggcagagctgcttgggcatcgccggctggaagaaaagctgaaagaaaaacttggcgtcagccaggcgattgttgtggctggtgatagcgacgaagaagaatgggtgaagcaggagttaggtagagcttgcgtcgatgaattgaaacgtgtggctaagaaaggcgacgtcttcgccgtaatgggcggtacaacgcttgcagctgtagcaaatatggtcacgccagatgagacgttagcgacaacgacgtttgtgcccgctagaggcgggttgggcgaaaaagttgaaatccaggctaataccattagtgctgagtttgccaggcgctcaggagcttcttaccggttgctgcacgttcctgatcaattaagcgaagaagcataccattcacttgtattggaacgatcagttagggaaatcctagatgtgattacgtcttctgcggttgtcatgcatggcatcggcgatgcgaggcgaatggcagctaggcgcgattctggtcagccgtttatcgagacattgaaacgggaagaagcggtagcagaagcgttcggctattacttcaatgcaaatggagagattatccacaagcagcgaacaattggcttgcaattaggcgagctggaaggcaagtacgtgatttcaatcgctggcgggcatacgaaagcaaatgcgattctcgcttatatgaagaatcggccaagtgatgtacttgtaacagacgaaggagcagctagacggctgttatctgagtaagatcctgtaaaaaaggcaactgcctttttaataaaaagaaattaacgctaggaggaaatcatcatggcaacaaaaattggtattaacggatttggccgcatcggccgtaatgtattccgcgcttcccttaaaaacccgaatgtagaggtagtagcaatcaatgatttgacagatgccaatatgctggcacacttgttaaaatatgattctgtacacggtgttcttgacgctaaagttgaggcaaaagacaactcactcgttgtcgacggaagagaaatttctgtatctgctgagcgcaaccctgctgagattggctgggacaagtacggcgttgaagttgtagtggaatcaactggtttctttacaaagcgtgcagacgctgcgaaacaccttgaagctggcgcgaaaaaagttattatttctgctcctgcttcagacgaagatattacaattgtcatgggtgttaacgaagacaagtacgatccggccaaccatcatgtgatttcaaatgcctcttgtacaacaaactgcttagcgccgtttgcaaaagtacttaacgataaatttggcattcgtcgcggcatgatgacgactgttcactcttatacaaacgatcagcaaatccttgacttaccacacaaagattaccgtcgtgcgcgtgcggccgcagaaaacatcattccgacaacaactggtgcagcgaaagctgttgcccttgtgctacctgaattaaaagggaagcttaacggtggagctatgcgtgtaccgactcctaacgtttctttagtcgaccttgtagctgagcttgacaaagacgtaaccgctgaagaagtaaacggagctcttaaagaagcagcagaaggcgatcttaaaggcattcttgcttactctgaagagccgcttgtttctggcgattacaacggcaacccacattcttctacaatcgacgcgctttccacgatggtcatggaaggcaatatggttaaagtgatttcttggtatgacaacgaatctggctattctcaccgtgttgtagacttgcttgattacattgctggcaaagggctttaagtaaaaataggcttcagaggaggaaggccatctgcctccctcctttgcgctgtctagatgtccgataggaggatcaagtaatgaacaaaaaaacgctttatgactacgattttgcaggcaaaacggtattttgccgagttgatttcaatgttccgatgaaagatggaaagattactgatgaaacgcggattcaagcagctttgcctacgattaaatacttaagtgaacaaggggcgcgcgttttgctagcaagccatcttggccgcccgaaaggcgaagtggtagaaagcttgcgcttggcgcctgtcgcgacacgccttagcgagctgttaggaaaagaagtacaagccgtccaggaagcgcacggtccagtagcaaaacaagcagtggaaggtcttgaagacggtggcgtgttgctgcttgaaaatgtccgcttttatccaggggaagaaaagaacgatcctgaattagcgaaagcgtttgctagcctagccgacatttttgtcaatgatgcatttggggcggcacaccgtgcccacgcttcaacggaaggcattgcccactatttgccgtcagcagctggttttctaatggaaaaagaactggatgtactcggcaaagcgttaagcaaccctgaacgtccgtttacagcagtcattggtggcgcaaaagtaaaagacaagattggcgttattgacaacttgctagataaagtcgacaatttaattattggcggcggtctcgcatacacgtttgtcaaagcgcaaggctatgaagttggcaaatcgttgcttgaagaagataagctcgatttagccaagcagtttatggaaaaggctgaacaaaaaggcgttaagttttatatgcctgaagatgtcattgttgccgatgatttttctgacgacgccaacaaaaaagaagtggccattagcggcattccagctgattgggaagcgcttgacattgggccaaaaacacgaaaaacctatgaagctgtattaaaagcttcaaaattagtgatttggaacgggccaatgggtgtgtttgagctcgaatcgtttgcaggtggcacaaaagcagttgcaaatgcgttggcagaggcgtcagatacgtattcagtcattggtggcggcgattcagcggcagccgttgaacaatttggccttgccgacaaaatgagccatatttcaacaggcggaggcgccagccttgaatttatggaaggcaaggaacttccaggcgttgtcgcactatcagaaaaataatgcagcggggtgatactatgcgtaaaccaattatcgcaggaaactggaaaatgaataaaacaatcggcgaagctgttgattttgtcgaagcagttaaagcaaacgttcccgcacaggcaacggttgattcggttgtttgtgcgccagccttgtttcttgaccgtttgctccaagcggtaaaaggaactgagttaaaaatcggcgctcaaacgatgcattttgaagacaatggcgcatttacaggggagatcagccctaaagcattgtctgatatgggtgtccattatgtgattatcggccattcagaacggcgagaaatgtttgccgagacagatgagactgtcaacaagaaagtgcatgccgcattcgcccatcagttggttccaattatgtgttgcggtgaaacggctgaagagcgtgaagcgggtaagatggaagctgttgtaaaagagcaagtagaaaaaggccttgctggtttaagcgaagaacaagttaaacaaacagtaattgcgtacgagcctatttgggcgatcggcacaggcaaatcagcgacagaaaaagacgcgaatgaagcttgcgcttatgtgcgtcaaacggtggccgctaatttttctgaagaagcagctgaggcgattcgcatccagtacggcggcagcgtaaaacctggcaacattaaagactacatggcccaacctgacatagatggcgccctcgttggtggagccagcttggacgcagattcgtttttagaattagtgggggcagcaaaatgagtaaaaagccagtagccttaatcattctcgatggctttggcctgcgagaggaagagaaaggcaatgccgtggcacatgctcaaaagccgaactttgaccgttactggaacgagtttccgcatgccacgttgcgggcagacggtgaaaatgtcggcttgccagaagggcagatgggcaattcagaagttggccatttaaacattggtgctgggcgcattgtgtaccaaagtttaacgcgtgtgaatttgtcgattcgcgaaggcgacttttttaagaatgagacgttcataaaggcaatggaccatgttaaagaaaaacaatcggcactccatatatatggtttgttgtccgatggcggcatccatagccacatcgaccatatttatgccttgcttgatatggcaaaacaacaaaacgtcgagcgcgtttatgtccatggctttttagatggccgcgatgtcggccccacttcagcagaagtatacttaaaaggattgcaagacaaatttgatgaagtcggcctcgggaagctggcgactgtgcacggccgttactatgcaatggatcgcgacaaacgttgggatcgagttgaaaagtcataccgtgcaatggtttatggcgaaggcccttcctataagaacgggctagagctgctcgatgacagctataaaaacaacattgtcgacgagtttgtgatcccgtctgttataacagaagaggatggtacacctgtagcaactgtcaaagacgatgacgccgtcattttctgcaatttccgccctgaccgcgctatccagctatcacaagttttcacgaatgaagactttcgtgggtttgaccgcggggaaaagatgccgaagcgcctccattttgtctgcttaacgaagtttagtgaaacagtgaaaggctttgttgcctttaagccgacaaacttggacaatacgcttggcgaagtcctttcccagcaaaactacacacagctacggattgcagaaaccgaaaaatacccacacgtgacgttctttttcagtggcggccgtgaagatgagtttccaggcgaagagcggattttgattaactcgcctaaagtcgctacttacgaccttaaaccggaaatgagcgcttatgaagtaaccgatgcgctcgtcaaggaaatcgaaggcgaaaaacatgatgtgattatcttaaactttgccaaccctgacatggttgggcattcaggaatgttggagccaacagttaaagcgattgaagccgtggacgaatgcttaggccgtgtggtcgatgcattgctacaaaaaggcggagcagcgattattacagcagaccacggcaatgccgacgaagtcgtgacacttgacggcaaaccgatgacggcgcatacgacaaacaaagtgcctgtcatcgtaaccgaaaaaggaatcacccttcgtgaagacggcattttagctgacttggcgccgactgtgcttgatttgcttggcgcggacaagccgaaagaaatgacaggcaagacacttaaacaataaattcaatttaggagtgaattgacatgacgattatttctgatgtttatgcacgtgaagtccttgactctcgtggcaacccgactgtagaagtagaagttcacctagaatctggcgttatgggccgtgcccttgtgccaagtggcgcctcgactggcgaatacgaagcggtcgaacttcgcgacggcggagaccgttatatgggcaaaggtgtccaaaaggcagttgacaatgtaaatgaaaagatcgctcctgaactaattggcgaaaacgcgttggaccaaattggcatcgaccgtttgatgattgaacttgatgggacagaaaacaaaggcaactttggcgccaacgcgattcttggcgtgtcaatggccgttgcccacgctgctgcaaatgcactagacattcctctatatgtctatcttggcggctttaatgcgaagcaacttccagtgccaatgatgaacatcattaacggtggagagcatgccgacaacaacgtagatattcaagaatttatggtcatgcctgtcggcgcagaaagctttaaagaagcgcttcgcatgggtgcggaaattttccataacttgaagtctgttcttaaagcgaaaggctacaacacagcagtaggcgacgaaggcggctttgctccgaacctttcttcaaacgaagaagcgcttgccacgatcatcgaagcgattgaaaaagcaggttataagcctggagaacaagtgaagttggcaatggacgttgcttcttctgagctgtacagcaaagaagacggcaaataccaccttgctggcgaaggcaaagttctgtcttctgaagaaatggtttccttctacgaagaacttgtttcgaaatacccaattatttcgattgaagatggccttgatgaaaacgattgggaaggccacaaacttttgacagagcgccttggcgataaagtccaacttgttggcgacgatttgttcgtcacaaacacgaaaaagcttgctgaaggcattgaaaaaggcattggcaactcgattctgatcaaagtaaaccaaatcggcacattgacagaaacatttgatgcaatcgaaatggcaaaacgcgctggctatacagctgttatttcccatcgttctggtgaaacagaagatgcgacgattgctgacattgctgttgccacaaatgctggccaaatcaaaacaggcgcgccgtctcgtacagaccgtgtcgccaaatacaaccaacttcttcgtattgaagatgagcttgctgacctcgctcagtacaatggtttgaagtctttttataacttgagcaagtgagtcctcaagcgcaatggatgttaatgtgtccattgcgcttttctttgcttatgtagtaaaaggaattaaaaataatgttttgacaataagcgttttatgttttatagtgtgatatatcagatttcatattttaaattggagctggttgtatgactgataaagatgaacgttttttctctgtcgacccaaatttagtaaagtcgctgcgtgaactggcagtcgaaaaaatccgtgaaggaattgtaagcggatactttgaagttggagagcatttaaaagagcgggaattatcgaagatgatggggattagtacgacgccaatcaaagaagcgttccggattttagaaaatgaaggcatgcttgtaaccgtcccgcgcaaaggcacatttgtttcagaatatgcttcaacatcaattgaagaaattctgcttctgcgcgccgcggtcgaatcgctatgtgcccgccttgctgcagtcaaaatgagtgaagaagacgtgaaggaacttgagcaagtggtgcttatcatggagagccttcataacaaaggtgattcagatgccttgattgaacagaattcacggtttcaccaaatgattatcgctagtaccgaaaataagatgatgcaaacgattttagccaatattcgcagcattgacaaagcattccggaagcgtgcccttaaagtcgaagtcgagcgcgaagtcggctatcaagagcacagagcgatttttgaggcgattaagcaacgagagccagacaaggcggaacaacgaatgaaagaccatattttgcggacgaaagacaatattttggctgcagaggcgagagcacaggccgagaatggtccgagctaatttttaagaaaagggtgatcaactgtggcaaataagccattggcaaaagcattagaaaccatttctggcataccaatcacgccgtttcgagaatctgacggcagcatcgattggaaccactacaaggaaaccgttgacaggatcgtcgacaatggcattgatgtgatcgttccttgtggaaacacgagcgaattttatgcattgtccctcgacgaagcgaaagaggaagtccggcgcaccgttgaatacgtcaatggccgcgctctagtcgtcgctggcatcggttatgcgacgtcaacagcgattgaacttggaaacgatgcgaaagcagccggggcagatgcggtcatgattcatatgccgatccacccttatgtgacagcgggcggtgtgtatgcctacttccgcgaaatcatcgaagcactagattttccgtcactcgtttattttaaagatcctgaaatttccgaccaagtgctcgttgatttggcgccacttgaaaacctagtcggcgtcaaatatgcgattaatgatttgcctcgctttgccaaagtggtacgttcgattccagaggaacagcagatcgcttggatttgtggaacagcagagaaatgggcaccattcttctggcatgccggggcaaaagggtttacttctggacttgtcaatcttctgccccaaaaagcagtcgagatgctggaagcattgcgaaacaatgacaacgatgcggtttggcgaatttgggaagacattgtcccttttgaagacttacgcgcgaagtacaaccaaggcaataacgtcgtcgttattaaagaagcaatggaaatgcttaggcaaaatgctggtgtgacaagggcacctgtgaatgaattaagcaacgaagataaacagcttgtgacagagctgctttctagctggaagttattacaacctacgaaaggatgaggcaaatggcgatcaaaacagaagtcgtatttggcaattatattaacggacactggaaacaagaagcggctccccctctcgcaagcataaacccgtctgatgccgaagaagttgtgggctatgtgcagaattccccggctgatgtcgttgatgaaggggttgaagcggcgaagggcgcccttttgccgtggcggaagctgacaggagcggaacgtggccattatttgtatcaagccgccaatcagttagaaagcagactcgatgaaattgcggaaacactcgcccgtgaaatgggaaaaacattgcctgaagcaaaaggggagacagctcgcggtgtcgcgatccttcgctattatgcaggggaagggttaagagcagatggcgaggtgatcccttccacagacagcgaagcgctcatgtttacgaaacgtgttcccctcggtgtcgttggtgtgattacgccatggaattttcctgttgcgattcctgtatggaaaatcgctccagcgcttatttatggcaatacggttgtgtttaaaccagcaacagaagctgccgtaacagcagcaaaagtagtagagtgttttgcgcaagcgggacttcctaaaggtgtgctcaatttcgtgacagggtccggcaaggtgatcggaaatgcactagtcgaccatgaacacgttcacggcttgacatttacaggctcagaacaaacaggtaagcaaattggaaaagcagctgccgcaaggggagcgaagtaccagctagaaatgggtgggaaaaatcctgttattgtcgctgaagatgctgatcttcatgtagcggttgatgcgacgattagcggcgctttccgctctacgggacagaaatgtacggcgacaagccgcgtcattgttgctgaagcgattcttcaagacttccaggagcttcttcttgaaaaaacaaaacaaattacgatcggcaaagccctagacgacggcgtatggatggggccttgtgcaagtgaagcgcagcttcgaaccgttctagactatattgaaatcggcaaaaaggaaggcgcgaaacttttatgcggcggcaagagagtaacagacggaaacagggcggcaggctattttgttgagccgacgatttttacaaacgtgaaccgccatatgcgaattgcccaagaagaaatattcggccccgttattactcttatcacagcgaagaacatggaagaagcgatcgagatcgccaatgacagccgctacgggttaagtgcttctattttcacaaccaacattgaaaaaatgctgttgtttattgacgaaatggacgctggcctcgttcgagttaatgcggaaagtgctggagtcgaattgcaagcgccatttggagggatgaaagcgtctagctcccactctagggaacaagggcaagcggcaaaggaattttacacatccatcaaaacagtattcgtgaaagggtgataaggatgaaaattacagatgtgcagttaacggcaatcggtatgccacgtttgactggttttgtcaataaacatgtgatcgtgcaattgtttacagacgaaggcattgaagggattggcgaaatgtccgatttctctcatctgccaaagtacgcggttgatattgttgatttggaacgtacgctaaaacaaattctcgtcggcaaaaacccatttgacatagcgccgatcaatacagagctaaatgggaacttccctgaagcgatgtactactatgaaaaaggcagctttattcgaaatggcgttgacacagcgctttatgacctttgtgcaaaagcgctaggcgtgtctgtgtccgatctattaggcggccgccaacgtgagaaaatcaaagtatgctttccgatttttaggcatcgctttatggatgaagtcgaggcgaatttagagctcgtcaaaaagcaatatgagaaaggttttgacgtatttcgcctttatgtcggcaaaaacgttgatgcggacgaggcctttttagcaggggtttacaacgagtttggcggcaaagtaaaagtgaagtcccttgattttagccatctccttgattggaaggaagcgttacggattacacggcgcttagcgaaatacccaatcgatcttgttgaaagtccggcactccgaaatgattttgcaggactgcaccatttccgtatgcgctgtgaattgccggtaagcgaacatgtctggagcttgcgtcagcaatcggaaatgattaaacatgattcagttgatatttttaacattgcgcctgtgtttattggcggcattacacaggcaagaaaagcggctgatgcagcggctgtagctgaaaaaagcgtccttatcgggacaacgcaggaactatcaattggcacaacagcgatggcctattttggttcaacactcgaccatttaaactacatttccgatccaactggcccagagctttatgtcggcgatgttgttaaaaacaaagtctattatgaaaacggttacttgcatttgcctgaacggtcaactatagggctcggaatggagcttgattgggaaaaagtcgagcagtatcgggtcgagtccctcacttgggaggatgtatccgtccatcaactgcaagatcgaaccgcacaaacgcgcgcttaaaacgggaggaggtgtaagtcgtgaagtggttccctttgctcgtgctgcaggctattcttctagtggcctgcagcaaccacgacgaaacagccgttacgcaagcggccattgatacgtatccaaagcaaacgattgaactttatgtcccagcctcgccaggggggcagtctgatgcgggagcgagggtgctagcgcgtcatattagcaaatatttagatagcgatattgtcattgttaatcaagatacagcaggcggtgcactagcgtttgaaaatgtctaccgcgccaaagccgatggctacaagcttctctactatcatcaagcactgcacacaagttatgccgttggccaatacgattattcggcgttggaaatgacgccgattggaacgtttgctggcattaaccaagtttttgtcacgcgtgctgatgctccgtgggattcattagaagaacttgttgaggaggcgaggcagcatccttacgaagtcttgtatggtggccaaatcggcggcactactcattttatgggggagcaacttggacaagttgccgatgtcgacataaaagtgcttgatgtcggaggagagtctgaccggatgacggcgttgctcggcaaccaaattgattttgtttcgactggcattggcaacgccttaaattatattgaatcaggcgattttaaagcgttagccgttctatcagaagaacgggatgagctggcacctgatatcccaactgctcttgagcaaggctatgacgttcagtttccaatcatccatacgttatacgggccgcctaatttgcctgaagagatcattcacaaatggaacgcagcagcagagcagcttgcagaagatgaagagtatgtacaagacctcgccacaacgttccagagacatattcaaatggatcataatgaaacccttacattcaaccaagaagaactcaaaaaagcagaaggcatcgcgtttgagttattccaagaagactagggataagggggagccaatatgtcaaaacgcgattgttggattggaataggaacgtttcttgtcggcgcctatatgattttggaaacgcttacgatggattatatgaggcttatggatgatcctgggccggttttgttgccaagggttgttggaatggcgcttgttgtttgtggtgttgctttaacagtaagtggattaaaagcaaagaaaaaaacggagcgaaaagaggattcgcctgaggcaaaaacgcggcaaaagaaaatgtatgtaatgttaggaagtttgtttttatacgccgtcgctttttcgacgttaggatacgtattaagcacgttcctttttttagctgccacgactttatacttgtcgagtaagcgaacgaaaaagcatgttgttcaagtaacagtggcatccctgcttattacgttttcaatctattggatatttaccgaatatctagatgttttattgccaggcggactttttcgatgaaggggggcgaaagcaatggatgttttacttgcgagcataactgacgtgttcaccccttttgtcgttctattaatggtattaggggtattcataggccttatatttggtacagtgcctggcctaacctcgacgatggcaatggccttgttcgtgccatttacgtttcaattagaaccgatacaaggaattagttttcttgtctgtttgcatttaggcggcgtttccggtgggctcgttgcttctacacttttaggaataccgggaacgccctcatcgatcgctacaacgttcgatgcgtacccaatggcgaaaaacggcgaaccggtaagagcacttggcattggcattgttgcctcacttgttggcggcttgctgagctttattgccttgactaccatttctcccctcatttcgaggtttgcggtacagatggggccatttgagttttttgctttaatctttttcgctctctccttgcttgccgtccttgcccaaggcagcatgttgaaaggaattactgctggctttattggtttagctattggcatggtagggttcgcgccaattgatgggctgcagcgctatacgtttggcgtgttagagctaaaaggcggcatcagtctgttgccgcttatcatgggcttattcgctatcgctcaacttttagcggaaataaaggcgggagatgagcgaaaggaaatgaacttctctgtgaaaggcattggcattaaggtggccgaaatattccaaaataagtggaatatgctacgctcgtcattcattggaattgcatttgggattttgccaggattagggagcggcacatcaaaccttgttgcttatgcacaaacgaagcaagcgtcaaaaaaccgtgacaagtttgggaaaggggcacctgaaggcatttatgcgtctgaatcagcgaacacagcagctgttggtggatcgcttattccgatgctgactctcggtatacctggcgatacggtaacagcgattttgctcggtggctttatgatccatggcattcagcctggcccgctgttttttgcggaaaaccgcgaaattgtcaatgtcgtgtttatcgctttcttcgttgcgatctttctcgttcttttgtttcaagtgttcgcgatgcgcttttttacacgtgtgttgatgattccaaaggaatatttatttccaattattcttgtcttgtgttttgtcggcgcctttgccactaactcttccgcttttgatattggtgtcatgctctttttcggtgttatcggttatattttgttaaaggccaagtttccgattgctccacttattttaggttttattctcgggcctcttctggaaacatatttgcggagagcgctcatgtcgactggcaatgtggccgacttttttacaaaaccattttcggcgattttcattttaattggaatcggctgcgtcctctttacgtttatcaatgaaacacgctcaaccaagaaagactcgaaatcagcaagtatgtaagaagttgacatccaggcaatagaagcggctgaaactgtagttttctttaaggtttggcattttataaaagccatgctatcgtaaaagggaaagaaaaaacgggaggcaggcgtgtatggctgacagtgaaattcttccccctgctgtagcaacttttttaaacggtgaacaattagaagaaaagcagcatgaggcgatgcattttttgacggttgatgacaatggttttccatataaagcgatggtaagcgtcggcgaagtgttggcctattcaaaagaccgcatacggattgcgttatggagtggaacacaaacggataacaatgcgatgcgttcaaaaaaagctgtgcttttactcgttacgtgcgaaacggcttttgacattcagctaatgcttgaaccgatcggccgtcaagagggcctcaccctttacgaagggcgcgtcttacgggtgaaagccgatcaagcgccttatgccaaattagagtcggcggtgcgctttacgttaaaggacccagatgcttcactcgcccattggcgccacaaacttgagcttctaaaaaactagcctattgttttcaagggcgtggctatgctaaactagtgatactgacgtgtttcgtggaggtgtttgttgatgcagctgtttttgatgatcgcattaattattgtttctgtcctcttagtcgctgttgtccttttgcagccaggtcgcagctctgggttatcaggcgccattactggaggggcagagcagttgctaggaaaacaaaaagcacgtgggcttgaggcggtattgcatcgagcaacaatcgtacttgctgttttgttttttattttgacagggttaaatgcgtatttcctataaacgatgcggaacacctggacttgccaggtgttttttctgtttcctgtttaatcgcagcttaaaaaaggaacaatcggatatagaggtgatgaagtgcgcttaagcattttagaccaagtgcctataaccatagggcaatcagcggaacaaacagcggatcaaacgtttcttcttgttgagcttgccgaacaatgggggtacgaacggtattggtttgctgaacatcatggtacaagggggcttggttccagtgctcctgaagtgtggatggcagctgctgccgcaaggacaaagacgattcatgtaggctctggaggtattttgttgccccagtatagcccttataaagtagcggctcagctaagacagctagaaacgatgtttccaggtcgaattgacggtggcattggcaactcccctgggggccctgaacgaatacgcgcggctcttgcgaatggacatacggacggaatcgctacattttgggagaaagtcgatgccctttccaagtggatacatggcggcaggcacaaggaagtgactgtttcgccgaaaccagcaagtacaccaaacttgtttatccttggtcttggagaacggagcgctatcgaagcgggccggcgggggttcggttttgtccatgggcgttttattgagcctaaacgagggaagttggcacacgctgcatatcgacaagcgtttaagggcaaagggaaaccagatgcgttaacggccgtatttatcatttgcggcgaaacggacgagcatgctgaagagttggcaaagacccaagatttatggttattgcggacggaaaaaggtttagatagccgcgtgccaaccagcataacagccgcatctgctcagctaagcgaacaagaccgtgtccgcatccagacgaatcggaagcggatgattattggcgggcctgaaactgtaaaacgggaattagaaaaaagcgcgaatgaaacaggctgcgaccaatttctagttcttacgaatatcgatgattttgatgagaagtgtcgctcttatgaacggttggtgaaggcgacaaaaagtcaataacatcagcagcctaaacgagtcagcgtgctggcgagaggagatgcgaacagagcagacgcttataagcatatcggcaaggcaaacgaatgcgtatgcgagcgtttgtctacagtttgtatccgcggctggcaatctgctatcacgactacaaagcaacaggaggaacctattgtgattgggtgtctatgtatacatggctttactggggatccgtgggaagtacagcccgttgccgacgaactgtcaaagcagcctggctggcttgtttacacgcctgtattgcctggccacggccaaggaagtctgcgggagttaaagcatgtaacatacaaacagtgggtatttgctgtggaagtagcggctgaagaaatgagaaaacggtgcgaccgcctttatctgattggtttttcaatgggtggaatgcttgccagttacatagcagcccgttttcctgttgacaagcttgtactgttaaatgctgctgcctactatatgaacccgaaacagtttgtaaaagatatgttctctgccattcgctaccacctgactggcgaacaagaaggcgatgagctaattgaactttatgaaaggaaatttcggacaacgccatttgccgccgtgcaccaatttttgcaactcgtccaaaaaacaaagccttatgcaagtaaagtgacggtgccaacgctcattatccaaggggagcttgatggccttgttccattaaagtcagcttattatctttatgatgtaatcggatcaaagacaaaagaaatcaaagtaatgaaacgatcacgccatatgatttgccatggatatgaagccgataaagtgattgaggaaattaaaacatttttgacagatcgacaaacagagagggaagatgacaatgaaattagtgccacctaaaccttttacatttgaaggaggacagcgggctgttctgttattgcatggctttacaggaacgactgctgatgtccgcatgcttggccgctttttgcaaaagcatggctatacatgccatgcccctttatatagaggtcatggcgtgccgccagaagagcttgtaaagtacagcccagaagattggtgggctgatgtacaggcagcgtttgaacaattgcaacaagatggctataaggaaatcgcagtgtgcggattatctctaggcggtgttttttcattaaaagcaggtttctctatgcctgtaaagggaatcatatcgatgtgtgcccctgtcaggcccaaaacggaggaagcgatcaaagttgggatgctccgttacgcgaaagagtacaagcgtcttgaaaagaaagaagacgcggtgatcgaagccgaaattagcgcgcttgcagaaaaatcgcttgagccgctttatcagttgcggcagttgatggatgacgtacgggaacagcttgacttgatttatgcgccaacgttcgttgtccaagcgcgctatgacgaaatgatcgataccgaaagcgctacgatcattttggacaatgttggcacagacgacaaacagctaaagtggtatgaacattcgacccacgtgattacactcggtgaggagaaagaacagcttcatgaagacatacttgagtttttaaatcacttagattggtcaaactaaaaacaaaagcttgaaggagggaaagaatggctgctcgattaaaagaagagctgcttgcctattttcaaaatgaggcgaaaaagcctgttacagtagatgaattagaagagcagttcggcatagcttctggcgacgactttaaaaagttgatccaaggcttgaatgaactggaagaagaggggagcattgtgcgcacgcggacaaaccgttacggtatccccgaaaaaatgaatttagtgcgtggccgtgtccaaggccatgcaaaaggattcgcttttgtgttgcctgaaaacggcgaggaagacatttatgttccacaaggctccttggcaggggcaatgaatggcgatattgtccttgtccgtatggatgaacggacaagcggcgctcgggctgaaggaaaagtgatccgcattattgaacggaaagtgacagaagtcgtcggcgaatataaacagttctcttcgtatgcgttagtggttgccgacgacaaacggattagcgcggatttccttgttgtcaacggccaagaaaaaggcgctgccgatggccataaagtgatcgcgacgattaccaaatatccagaaggccgcttcggcggggaagcagaaataaaagaagtccttggccataaaaatgacccaggcatggacattctgtcgatcatttacaaatatggcatccctcaaagtttttccgaagaagcgcttgcacaagcggcaaacgtgccagatgagattacagaagcagacttgcagggcaggcgcgacttaaggaatgagcaaatcgtcaccattgacggggctgatgccaaagacctggatgatgctgtacaagtaaaaaaattagaaaacggccattttttgctcggcgtacacattgccgacgtttcccattatgtcgaagaagggtcgccgattgacaaggaagcgtctgaccgcgctacgagcgtctatttagttgaccgcgtgattccaatgattccacatcgcctttcgaatggcatttgcagtttaaacccaaaagtagaccgtttgacgctgtcttgccaaatggaaatcgacgaaaatggtggtgttgtgaaccacgaaattttccaaagtgtcattcgaacgacagagcggatgacatatagcgacgttaacaaaatactagtcgaacaagacgaggacttgcgagaacgttatgaaacgctagtaccgatgtttgaagcaatggaacagttggcacaaattttaagagacaaacgcttcgcccgtggtgctattgattttgattttaaagaagcgaaagtgcttgtcaatgaagaaggcaaagcgacagatgttgtgttgcgggaacgctcagttgcggaaaagctaattgaagaatttatgcttgccgctaatgagactgtcgctgaacatttccattggctgaaattgccgtttgtataccggattcacgaagaccctgatgcagataaattcaattcatttttagagtttattactgggtttggctacgtggttcgaggcacagctaataccgtccatccccgtgccttgcaagcacttttagaggaaatttccggtgaaccagaagaaatggtcattagccgcgtcatgctgcgctcaatgaaacaagcgaagtatgatgtccaccctgttggccactttgggttgtcagcagacttttatactcattttacttcgccaattcgccgttatcctgatttgctcgtccatcgcctcattcgcacgtacttgattaaaggcaaaacggatcgcaaaacaacggcaaaatggcaggaagtgctgcctgggttaacagcccacgcttcagaaatggagcggcgcgcgattgacgctgaacgggacacagacagcgtgaaaaaagcccaatacatggaagataaaattggggagacgtttacaggaatcattagcggcgttaccaacttcggtctatttgtcgaattggagaatacggttgaagggttagtccatgttagctatttgacagacgactactaccattatgaccaaaagcattatgcgatgattggcgaacgaagcggcaccgttttccgcatcggcgatgaacttgaagtccgcgttatccaagtaaatgtcgaagaagcatccgtcgactttgaaattgtcggtatgcaaccgcgcaagccgcggaaaacgcttgagcggccaaaagtgattgatggcggaaaaagacagcagcggaacggaaaaaaacgtgaaaagcatcgtttgacaggtgatccgaaaaaagatggcagccggtccaagcggaagaaaaagccgttttatgaaaatgcccctaaagcgaaacgaaaaaaaggccgtcgtaaaacgcggaaatgacaacttttggatagtgccctgtcatgtatgactaggacatccgacagtttcctacatgtacctgcttgcacaatccttgttttctcccttacactacaagcaataaggagggagaaacgtgacaaaaacagaaattgggatattgcttgtccgtgtcaccgtaggaatcatttttttattccacgggctggataagtttaatggtggaattgaagggacgggcgcgttttttgattcaatcggcatcccagcagcaatggccagcgttgttgcctttgtcgagatcattggcgggctcgcccttatcctaggattaggcacccgtattgttggggctatgtttgcggccattatggttgtagccatcataaccgcaaaatggaatgcaggcttgcttggcggctacgagcttgatctcattttgctagtaacttcgcttttgcttgtgttaaacggcagcaaactgcttgccatcgatcaactttttggaaagaaaaagcgccgccgcttttaacgcctgtcgtctagtagaaattgacgaatcgccgctccgttggtacgataaaaggaagatgtgttagaaagatgcaggtggaatgcatgggagaaacgacagaaggcaaagttgttgcgcaaaataaaaaagcacgccatgattattttatcgaagaaacatttgaagcgggcattgtcctaaccggaacagaaatcaagtcgattcgggcggggaaaatgaatttaaaagattcctttgcccgcatcaaaaatggcgaagcttttttgtacaatgcccacattagtgaatacgaacaaggcaaccgctacaaccatgaaccgacacggccgcgcaaactgttgctccataaaaaacaaatcaatacattaattgggcaaacgcagcaaaaaggctattcaatcgttccattaaaagtctatattaaaaacggctttgccaaagtgcttatcggccttgcaaaagggaagaaaaactacgataagcgggaaacattacggcgaaaagacgcgaagcgcgaagtggaacgggcaataaaagagcgcatgcgcggttaattaagtgggacactgcaaattgttgacatttcagcagaatgtagtataatgaaatatccaggcattgacctggatatttcaaaaccaaggggacgttttggattcgacagggataggtcgagcttgcgttgcgagccgaggggtcggcctcgtaaaaacgcacaagccaataactggcaaagaaaacaacaacttcgctctagctgcataagctaagcggtctctcctctccatcgcccatgtggagtggctgagactcaactttagtgggatacgcctttctccccccgcctgagggagaaggaagagactaatcaggctagctgcacggaggcctgtctttgggctgaagtgctagcgaaatacgaatacaaagactacgctcgtagaagcgtaagtgtcgttatctctggacgtgggttcaattcccaccgtctccatataagagccgcggaagtgttgatttgtcaacatttccgcggtttttttgtgtaatttattatgaaagctactcgttcatatgaggtaagtatagctgagtaaaagtggaacagaattcccactctctacattcattaccaatcgtattgcgattaaataagcgctctttataaggatttaaaatttatcacattgtacattaaatttgttcccatcaggatcatagaaatctaaaaataaattgccgagcccatcatccatattgttttctactttgactgcgttcctttttaagtgattggctaacgcttctatatgtttgcattgaaaggcaatcacgggatgtgtttgattgttgactttaaacgttgcagtagtttgatgagtggattcaactaaaaataacatttgaccagaggggaaatttagttgtgcttgtcgctcctcttcactatgtaggatttccttataccatttgatcgcattttctaagtgtgacataggaacatgacaatagaatagttgttctaacataacgagcctcctggatttttgcatttatcaggttcaattcgctcggttttttagaaaatcctgtttgcacttcgtcacttcattaagtattacaacctcctgtacatcccttccgactttcaatcgatcttgatcatcaagtttgcgcagcatcgccaaaataaaagattcctaaacggccattatttatgtataattatcaaatacagagattaattatacggaatgggtgtctaatgtggaatcatacaaatcggtaaaatcaaacaaacaacgtcctatacaatcgcgccatcttgcgacttttcttatcccctctttagctggagcggtcctgtttttagtcccggtaaaaatagacgacaattggactgttttcatcggctatttggccggtttgatagaagacggcctttctggcgttttgcctagctttttattggccttgctcgtgttttccggtgttgcctcttttttgtgttgggcgtttaaacctgcatttattatggataagccagccttaaaaacgttgttttatacatcttttacttggacggcgattcgtgtcctcggcgctgtgtttgcgctaatggtcatgacggggactggaatggaaatggtgtacaacccagcaacaggggggacagtgtttgccgatttattgcctgttcttgccgtgtggtcggttgtaatggggctgctcatgccgcttttgcttgactacgggttaatggagtggcttggtacgcttgcccaaaaaattatgcgtccactgttcaaattgcctgggcgcgcttctgttgattctcttgcctcgtggatgggcaacaacatgatgagcattttaattacgatcaatcaatatgaaaatcgctattatactaaaaaagagtctgcggtaatcgtcacgaattttacgattacatctataggcttcagtttaattatcgctaaaatgctaggattggaacatcgctttgtatctttttacataactgttcttgtaggcgttttgctcgctgcgtttatttgcccgcgcattccgccgctatcgacaatgaaaaatacctatcacctcgatcagcctggagcgattgaagaaacggcggaaataggctctttatggaaaagcgcttttgcccgtggtatcgataaggctaaacaagcgcctcctataagcacggtattaaaaaaaggggctttcaacgcattggatatttggcttggcatgttgccacttgtaatggcaattggaacgcttgccttaatagtcgccgaatacacccctgtatttacgtacctttcctatccacttgtgcctgtattggaatggatgcagattccagacgcagaggcagctgcaccagccatgcttgtcggctttgcagatatgtttttgccagctatactaggagcagggattgaaagcgagttgacgcgttttgtcatcggcgctgtttcgctcattcaacttgtttacatgtctgaaattggcgtaatgcttattcgttcaagcatcccgattaacttctggcaactgtttatcatctttatccaacgtacagtcattgctttgcctgtcgttgtgctgattgcccactttatgatttatcgttaaaggagtgcccttaatgccacaagaatggaatgatttagcacaaacaattccgtaccgccttgccccaagcatggcgaaagaccatccgaacttgcctgtagaaaaagaagaaggctgttattattacggcgtcgacggaaaaacgtatttagattttacatcagggattgctgtgaccaatgtcggacaccgccatccaaaaattgtcgcggcgatccaagaagaagctggacgttttacgcatgggccaattggcgtcatccagtatgaatcaattttacagcttgccaatgagctggctgaaatcatgccaggtgatttagattgcttcttttttggcaatagcggaacagaggctgtagaaggggcgcttaaacttgcccgccatgtgacaaaacgcccgtacgtcatttcttttaatggctgtttccatggacggacgctcgggtcgctcagcgttagcacatctaaggcgaaataccgcaagtaccagcctgcacaagggatggcttatcaaattccgtattatgccactggcgatacggaagaacaagctattgccaagcttgaggattcatttgcctccttatttgcccaccaagtatcgcctgacgaagtggcagccgtcattattgaacctgttcttggcgaaggagggtatattgtcccgcccgcttcttggctgcaacggattcgcactatttgcgacgagcacgggatgttgctcatttttgacgaagtgcaaacaggatttggccggacaggagagtggtttgccgcacacacttttggtgtcgtacctgacattatggcgattgcaaaaggaattgcttctgggctgccacttagtgcaactgtggccaatcataagctcatgcaacagtggcctttaggaagccatgccacgacttttggcggaaatccgattgcgtgtgcggcggcacgggccacaattgcagtaataaaagaggaacagttgcttgacaatgccaaacaagtaggcgcatatgtaaaacaacgtttgaacgccatgcaagaaaaatggccgcaaattggcgctgtccgcggtatagggatgatgtttggcattgaaattgtcgacccgaaaacaggtgaaaaagacggggacactgctgcaaagattttggaccttgcattagaagagggcgttctcttttatttttgcggcaatgccggagaagtgttgcggatgattccgccattaacggttacaaaagcggaaatcgatgaaggcttagcgaaattggatcgggcattcactcggctaggctagtggatgcaaatagcgacggccttttaattaagtttggacgttttacaacaacgtgtagcgtgtaaaaggcgtaacacctatatgacattaaatgaaaagcagcagctgctgcttttttttgtttatcaacacgtccttctaaaaactttttcgtgatacaaaaaacaataaaaatatcatttttttagttgggaaaattcgcatttctatagcgtcagtagcctaatcatgttattttgtaaccgattctattattcgaagaggaggatgattgtgagattaattcgcttgtcatttttaactgttctagtatgtttgcttacatggggaggtgcttattcttctgaagtccgcgcccaacaaacatcaagtatcgattttgataaaccaattgtgctcgtacatgggattggaggagcgggttacaatttctatagcattgaaagaaagttaagaagcgttggctatgatcgttctgacttacatgcaatagattttgccgaccgctccggaaacaattacaggaactcccgacaattgagagattttattaacgatgtactaaccaattatgatgtcgacgaagtaaatattatagcccacagcatggggggagcaaatacattacggtatcttacccaactcggaggcgttgaacatgtagacaaagttattacattaggaggagccaaccgcttgggtgcaagttcagtgccagacggagtcgattttacatcgatttatagcagttccgatttaattgtagcaaacagtttgtcgcggattgacggggcaaataacatccacgttccaggcgtcacacatttgcttcttttgacaaataacagggttcaagatctgattatcgaagcattagaaaaggaataaaaacaggtgcctttcttcggataggcgccttttttcaatcgctttgtaagaagctagtacaaacttgtctattttgctaggagcagtttccttttattttccgtatcgagaacttgtaagaatttgcttgtatgaattagtcagaaccttaatggacggccaaagaaaatgtttacacttgaattgacaatttatcttttaaataaatagacaacccttttatccagttttgttttttgaaccaattcttgcttaaggcataatatatatataagcataactttgccttttttcagaaagggcaaggcgtacatttaaaaagtgtggtcttaatcctaattattatataaaggaaaacattatatggagtgaatgaaatggatagtgaacacatttttgatacacaaggtatttatattggccgtttgtttacgcttggaggttctgccttgtttttaataggttcatttattgcagcttactttgcttataaagattatcaagaagcattagaagcagaacccgcttcacttcataaagggaagcggcgctaaacgaaagaccggcgttgtgttttgtttgtttggaagagaatttatggcgatcgaccatttccgatagtgttaaaaagctgtagccttcatcttgcaaggcggggataatttctttaattgcttctattgttggcgtacggtcaccgcctccgtcatggaaaagaatgacatcgccaggacgtatattgtttaaaacttgggctgaaagttgctttttattccggtttgcccaatctcttgtatcttgatgccaagaccataaaaaaacgtcgtgttttgcctcaatcgcagtttcaataataagatcattataatagcctccgactgggcgaaaaaaggttggtttgatggcgaacaattctaaaagaagcatgtccgttttgttcatttcagtggttaaggttgcttggttaattgactcattgtaagtgtgggtatacgtgtgattgccaagttcgtgtccttccatgatcgtcctttggacaacatcggcattctctttcacattcttgccgactacaaaaaaggttgcttttgccccgtatttcttaagcacatctagaataaggggtgtgtttgtacgatccgggccatcatcaaacgttaaggctacaattttttcatctgttggaatttcccagaacacatgtcctgtcttttcgtactcatgcctttctctcactatagcagcgtccacttgactcggtatcagtaaaaataagacatgacaaatcaatatataacgaaacacagtcttgaaagtcggccaatacacttgtctctctccttttttaaacaccgttccatttattatggctctttacaatgccgtttatccgaacaaattaacgtcatcaccatcctgtttttgatggaatatactattcaatcagcaagcaggaggggtcggcacatggatcggcaaaaagtgtgctttattagttgtgtcaatgatgaagatcagtatgcccgggctgtgagccatattgacatgctttatccgcctaaaggggtaacggtagaaaaagtggcgatccgtcatgcaaaaagcatggcaagtggctacaatgaggcaatggaaaaaagcgatgcacgctacaaagtgtatatgcgccaaaatacgatgatcataaaccgcatgtttttgcatgatttgttgtttttatttgaacaacatcctgacttaggcatgtttggcgtcattggcgcaaaggacttgcctgcttcaggtaattggtgggacagtcccacgaaagccggtaaaatgttggaacatcgccatacgtatagttatttatcgtttttagaagcggagtatgcataccaacaagtcgaagcgattgatggtgccttaatggctacccaatacgatttgccttggccagaagtggttgatggctggcatgtatatgacaccgtccaatctctaaaattccagcaagctggattcaaagtcggtgttccccatcaaccgcacccgtgggtattacatgagtccgcccttcagtttgacgagtccccctcgacgcgctctgtctccttgtttcaaaaatggcgggactcccgtgatgatgacgactaaagacgtgttgctagatctaagatttgccgcgtttcagccaaatcgttgtataatcgacccagccgtaagcatttaatgccacatttttgacgtattcaggatacaacgcaaattgttttaaccggtagagggggaggagataatgtgcttggcaaagcgatgtttcgattgtttgtaagctagccagcaatgtttctgtttttaattcctgatgccataaacgctttgctttttccaaatcgtctgtccccacgtgtgaataaagaaaccggtggcgatcaaaaaacaaggaaaaatagccatacactttgtcatcgtagccaagctgctcgccgagcaaaaggtctgctttttgttcgaggtctaattgttgaagctcatgataaggaaggaggtgcaaccgcacagaaatgccttctgctttaagcgtttgttcaatccaaccagcatccctctcattgcccgctccggtgtagctatatagctgaagctcttctccatggtagttgctctttaacaagcttgcctgtccttttagcctgttacgagtcgttaggacgctttgcccttgggcgaaaacacgatcagctggaatactgcgggtgccgccaatgtcttgaatcattgaatgtggatctaaaaaatgaaacagcgcctcgcgcaagcgagtgtcattggcacaaaggccgtgctttttgtttaacgaaaggagtttgcagcctatgtccattgagtgctgctgttggaagtgatgctcttctttttcgacgtatgggtaatgataaaaatttaattggtttgcggctaagaatgctgtttctggttcgttgtcataaagggctggaaagatatacatggtcactgcatcaaggtgtggcctcgtactaaagtagcgcggaaatgcttgaaggcgaaggcgcttacttgaatggtccgacaaggaaaaaggccctgtgccgattggaaaagatgtcatttcgtctttatagacaatggccccgcctaatgaagcagcaaacgccagaaaatgcggagtaggcttggaaaaacaaaactccactgtgtaaggactaagtgcagataggcgatgcaaatgctggattccccaataatagggcgacttttccgtgtggcgtaaaaaactggcgccaacttccacagcggtacaaggctgcccattatgaaagaaaatgtctttccgcaaataaaaagtccactttgtgtttgtagtgtctgtttcccaataatgggccaaatctggaatataacagccgttattaggatcatactttacgagttggttgaataagtggctcatcaaatgattttccgtccggcggtgtatcgtagccgggtctaatgcgcaaaccccacggtaagtagggaaacggagatgatcctcttgctcgatttgttccaggttaattgaatttaaaattgaatcaataaaggagcggctgcttgcgtgtgagcgtgaataggtttgaacgagttgaatcgccgcatcaagtgattgctcagaagcgcgtttttttgcttcagctatgacgacagcgtcatagtctgccaacaagcgaatataggacacatggcctctgcctttgccaggccgccattcaatccagccacgcttttgcattttttggacaagcaattttgcgttccgttctgtacatgaaagctcgtttgctaaagtacggacagaaaggggctgtcgcgcttgtgagtagtttaatcgtttggccaacatgaggtagtgctcaaacagttccattgttccgagcctcctgtctttataaaaaaggggaaaaataactatatctagtttacactttttttcccgttttgggaccgccataatggaatgaaagaaaaggggcggttttattgcaagcaaaacaggaggagaaaaaaggggaacgcctccaagcatccccgcaaaagaaagtggtggcgattgcgctattaacagccgctgccgtgcttggcgatgcaatgttgtttattgtgttgcccctttactggcaggagtttggccttacagctctttggcaaattggcatattgttatctgtcaatcgcttcgtccgtttgccaataagtccccttgtcggctggttttatagcaagtttgaactgcggactggtgtgcaattggccctcattttggcaacggccacgactttttcgtacggctttttccaaagctttgctacccttgtcgtggcacgggccgtttggggtgtcgcttgggctttgttgcgtattggcggcatgcttgctgtagtggaattttccagcaaagacaatcgtggccaactgatgggcacttacaatggtttatgggggattggcggactggtcggtatgttggcaggaggcattttcgtcgaacaggtatctgtatttccagtcacgactgctttcgcgacgattggcacaattgccttcgtcatcgccccctttgtgatcccgaaacgccaacaaccagatgataacaaaccgcttactcatgttaggagagcagaaaaaaccctttcgccttttacgatgctcgtgttcgcgacaggccttacgatggggttcgttgtgttcggactgttttcggttacactcagcccgcttgttgagcgcgcaatgggtgggcaacagctggaagcatttggtctaatcatcggtgcagcttcaattgcaggaatccttcaagccttgcgctgggcctgggatccattcgttgcccctttttatgggaaaatgctagaccgcaggccgctttcgtatttatggatttacttgcctatactcgggattggttgtttattttcgttatttgcgctgcttgattcattttggcttttgttaggggccgtacttgtatttcaacttctgtcgaccttttttgtaaccactgccgatacacttgcagcccgggcggcggcgcaagggaataaagtcaaagtaatgacgatccaggcagtcgtagtcgatttaggagcagcgactgggccgcttgtatcgtttttcattgtcgacacctatgaattggcgcctttatattggctagctgccgcgtttttaagtacactgtctgttttatggtttgcttatagcctcaacatgcgacgcaagccaacttgacgaaaaaggacctgtggtaagcagttgccgaagctcctcttcagcaactgccttccttattcaaaaaaagaaaaacgatccaaaaaaaagaaaatttcttattgcaaacgctatcataattgactatagtaaaagaaagccttctttgagaagccctttttttaacgttaaaaatgaatgagtgttcattcggtttgattatttgagaggaggaatacgatggttcgtcctatccgcaaagcagcagtcattggtgccggcgtaatgggtgcaagcattgccgctcacttagcgaatgctgggatttccgttttattgctagacttagcaccgcaagatgatggcaaaagcgccacaaacgtggcaacgctcacgaaaaagcggagccgcaactaccttgtggaacaggcgattgcaaaattgaaaaagcaaaagccggccccattggcttcaaaacaagcacttcatttgattgaagccggaaacttagaggatgactttgacaaactaaaagatactgactggattattgaagccattattgagaacttggaagcgaaaaaacagctattggctaaaattgacgaagtccgcgctcctggtgcaattgtatcatccaatacttctggcatatcggtggaagcaatgtcgcaagaaaggagcctagattttaaagcccattttctcggcacgcacttttttaacccaccgcgttatttaaaattgcttgaggtgatcccgactaaggaaacgaaaaccgaggttacagaatttatgcgcgagtttgctgaaactgcgcttggcaaaggggtcgttgaagcgaaggatacgcctaattttatcgccaaccggatcggcacatatggattgcttgtcacagtcgatgaaatgcttaaagccaatgcatcgattggtgaaattgattctgtgacagggccactcatcggcaggccgaaaagcgcgacattccggacactggatgtagttggactggatacgttcttacatgtggccaaaaatgtctacgaggagacagagggtactgaaaaagcgatgtttgatcccccggcttttatgaaggaaatggcgaagcgtgggtggattggcgcaaaaagcggccaaggtttctacttgaaagaaaacggggcgatttacgaactaaatccccacacatttgaatatgaaccgcgcaaaaaaatgaaagcgccttctatggagcaagcaaagttaatgaaatcgaaatctgccaagttacgtgcggttgtatgggcagatgatccagcaggcaagctgctctggtcgattttaaaaccggtattgctttatacagccgagaaaacagcggaaatagcccatgatttgttggcggtcgatgaagcgatgcgctggggctttggctgggaaatgggcccatatgagctttgggatgcactcggtgtaaaagaaacagtggaaaaaatgcaacttgagggcgaatttgtgccgacatgggtgacggctatgcttgaacaaggccatacgtcgttctacaaagatggcgctttctaccacgacggcgactatcttcctgtccgcacccataaaaagcagctgcctttaaacgcgctgaaaaaagataagacgattacaaaaaacacaggtgcgtctttaatcgatatcggcgacgatgtcgccttgctgcagtttacttcgcctaacaatacgattggccttgatgtaatccaaatgatccacaaagcaattgacgaggcagaagcaaattaccgcggccttgtaatcggcaatcaagggaaaaatttctgcgttggcgctaacttaatgatgatgctaatggaagcgcaagacgacaacttttttgagcttgatctcgttatcaggcagttccaaaaagcaacagcgcgtatccggtatgcaaatgtccctgttgtaaccgctccttttggaatgacgcttggcggcggtactgagatcagcttgccagctgcaagcatccaagcagcccacgaaacgtatatgggcttagtggaaacaggcgtaggcctcattccaggcggaggaggcaataaagaactgtacctgcgcaatatagcccgttatggcagcgacaatcttgctgatttgcaaaaggctgcgcgaaaaacgtttgaaacgattgctaccgccaacgtatccacatcagcggcagacgcgaaggaaaaaggctttttgtctgaacgggacggcattacaatgaacgactttttcgttaataacgatgctaagcagcgtgttctgtctctagcagagggatatcggccgcctgcaaaaacaaagatccctgtgacaggaagagcaggttatgcgacgttgatgcttggcgcgaaaatgatggaatggggcggttatgcatcagagcatgatttgaaaatcgccaaaaagctagcattcgtcctttctggaggccaggtgccagaaggtacgctagttgatgaatcttatttgcttgatttggaaagggaagcgtttttaagtttgatcgcagaaccgaaaacgcagcagcggatgcagcatatgcttacgaaaggaaaaccgttgcgcaattaaattaataaaggagggcggcatctatgaaagaagcagttattgtggcaggtgcgaggacaccagttgggaaagcgaaccgcggctcttttaaacatgtgcgttccgacgacttaggcgccattgccgtgaaggaaacattgcgccgcgccaaacaagtcgaaccggaagaaattgacgattgcttgatcggctgcgccatgcccgaagcggaacaagggatgaacatggcccgaaatgtgagcgtgcttgcgggcattccccaatcagttccagcagtgacaattaaccgctattgcgcttccggcttgcaaacaatcgcttatggggccgaacggattatgctagggcatgcgaaagcaatcattgcaggtggcgcagaatcaatgagcatgattccaatgggaggtcacgtcgtcaaaccgaacccaacgttgatcgacgaagcaccggaatattacatgtcaatgggctatactgcggaagaagtggcgcgccagtacggcattagcagggaagaccaagacgcatttgcggtagaaagccataaacgagcagcggctgcacttgccaatcagcgctttaacgatgaaatcgtacctgttcctgtcgttgaacagcactttggggcagacggaacggttcaaacaacggaacgacttgttgagatggatgaaggcgtgcgcgcagatactacgatcgctgcacttagcaagcttaagccagcattccagcttaaagggacggtaacagctgggaattcatcacaaatgagcgatggcgctgcggctgtcctgctcatggacaaagaagaagcggaagctcgggggttagaaccacttgtaacgtttaaaagctttgctgttgcaggggtagcgcctgaagtgatgggggttggcccaattgaggcaattccaaaggcggtgcgtctggcaggattacagctagaagagattggtttgtttgagttaaacgaggcttttgcttcccaagcgcttgccgtcatacgtgaattggggcttgattacgacaaagtcaatgtcaatggcggagcgattgccttagggcatccacttggctgtacaggcacaaaattaacgttgtcgctcatccatgaaatgaggcggcgcgatgaacgatttggtgttgtgacgatgtgcattggtggcggcatgggggctgctgctgtgtttgaacgacattaaacaattggggaggcgaaccgaggatgagcaacacgactgaaaaactttttaaaggtggcggctttttgcttgaagatatggagcctgcccacatctttacattggaagacttaaccgaagaacaacaaatgattgctcgtacgacaaaggattttgtggaaaaagaagttttgccttatgtcgatgaaattgaacagcatcaatttcaacatacgacaaggctgttgaaaaaggctggggaattggggctgcttggcgctgatgtcccagaagaatatggcgggcttggccttgataaaatcagttctaccctcatttcggaagaattttcaaaagccggagcgtttgggctaagccacggtgcccatgtcggcatcggcacgttgccaatcgttttttttggcacgaatgaacaaaagagcaaatacttgcctagcttggccagtggcgagacatttgccgcttatgccttaacagagcctggctcaggttcagatgcgctgagcgccaaaacgacagcagttctaaacgaagcaggtacacattatgtcttgaatggtgaaaagcagtggattaccaactctgcttttgcggatgtgttcattgtttacgctaaggtagacggcgaaaagtttaccgcttttatcgtagaaagaacgtttgatggtgtcagcaccgggccagaagaaaagaaaatgggcattaaaggatcatctacgcgtacactaatattagaggatgttgtagtgcctgtggacaatgtccttggcgagatcggccgtggccatgtcattgcctttaatattttaaatattggccgttataaacttggagtcggctgtattggcggtgctaagcgggcgttggaactggcagcgacgtatgcgacagagcggaagcaatttaaaacaacgatcgcttcattcgctttaattcaagaaaaactcgcttccatggcaaccgaaatttacgcgtcagaaagcgccatttaccgaacaggcggactgattgaaagccgctttgccagcttaaccgaggaagaaaaaaatgatggccgtgccgttgctagcgcgattgcggaatacgcaattgaatgttcattgaacaaattcgctggttcggaaacattggattttgtagctgacgaagccgtgcaaatccatggcggctatggctttatggctgaatacgaagtagagcgtatttatcgtgattcccggattaaccggatttttgaaggcacgaatgaaatcaatcgtttgcttgtcccgggcacccttatgcgcaaagcgttaaaaggagatttgccgtttttgcaaaaagcacaagcgttgcaagaagaattaatgatgcttatgcctcaagaaattgatgatacaccgttggcgcaggaaacccatttgttggcgatggctaaaaaagtatttttgatggtcgctggaacaggtgcgcaaaaatatggagcgcaactggatcaagaacaagaagttcttgctgcggtagcggatattgtcagcgatatttattcaatggagtcagcgattttgcggacgcagaaagcacttgacgcgtcatcaccagagaaagagcagcaaaaacttctattaacagaagtgtttacacaagaggcaattaaccggatcgaagcaaatgcaaaaaaggcgttgtcttatatggaagagggagatacgctgcgcacgatgctttcgatgttgcgcaagctaacgcgtcatcagcctgttaatgtcgtggcaaaaaaacggaaaatcgccaaggcgattattgctgaaaagaaatacgtcatttaaggtagcaattttggggcttttggccccaaataaaaatacaatgctcctctcgcaaggggtattctcctctcactgaagaagcctaatcacgggcttcttctttcatgtgagccaaaaagttgtgtatgcgatggttttcggtaataatagacacgagtccactggatagaaaggatgctggaaatgggtgtaacggtttatcaatatccaaagtgttctacttgccgtaacgcattgaaatggcttgatgaacacggtgtttcttatgaagcgatccatattgtcgaggcaccgccgacaagtacaacattgaaggaacttcaccaaaaaagcggtttgccattaaaagcgtttttcaacacaagcggaaaaaaataccgggagcttgatttaaaaaacaaactcggcgaaatgagcgatgaagagcaatatcagctactagctagttcaggtatgttgataaaacgcccgattgtaacagatggcacaaaagtgacacttggctttaaagaagatcaatttcaagatatgtggtcaactttttagtggtgtaacaagaagatttcctttcgcttatgagcgatttcctgtatgataaacttcgaaaagaccacattggaggggttaacatgagtaatttacctgaagagctaaagtattccgaagaacatgagtgggtaaaaacggaagacggcaaagtccgtatcggcatcactgattttgcccaatctgaactaggcgatattgtcttcgtcgaacttcctgaagtgggcgatgagattgaagcggacgagccatttggcagcgttgagtccgtcaagactgtatctgaattgtatgcgccaattagcggaaaagtcgttgaagtgaatgaagaacttgatgattccccagagcttgtcaatgagtcaccgtacgaaaaagcgtggatgatcgtggttgagccggctgacgcaagtgaagtggacaagctgatgtcagcaggagaatatgcggagatgattagcgaagattaatgctttagctcttcttctggctgatcttccctcggatacaaattttcctggcgtgcactctaaatataggcgtttaagccagaggagactcgggaggaagaagcacgtatagaaacggttgtcgcaaacgaacggagaaggctggccgcttcaggtgccgtagtgaatagctgcggccctcccatcggcgttggcttcatggcaagatggacgttttctatatgagttgcctagttggagagatggaaataattgctgatcgaacgcgaatcgatcgaatagcgaagacttgcctggcaggggcgggtctttttttctgataccgatagggttttgctttattcgcgcaaggcagtttaatttatttaagaaagaattgacgccgccataaagccatgctatgatacggctacattagagtttgataaaacaaccatattcattcttatcgagagaggtggagggactggcccaatgaaacccggcaaccgcaagttcgcttgaaggtgctaaatcctgcaaagcatatgggctttgggagatgagagggaagcaacagcaccctttctgtctgtccggcagaaaggtttttttatggagggacattgacaatgatttctctgaaaggaatcagcaaaacgtttaaaacgaaaaatggcgctgtccaagctgtcgataacgtcaaccttgaaattgaagctgggcaaatttttgggatcattggttatagcggagctggaaagagcacgcttattcggttgcttaatttgcttgagaaaccaacggaagggtccgttaaaatagatggcaaggcactgtcgtcgcttacgccaagtaaattgcgggcagctcgccaagaaattggcatgatttttcagcattttaatttactttggtcgcggacggttaggcaaaacatttcgttcccgttggaagttgcaggagttccagctgcgcaacggaagaaacgggtcgaggaattgattgaacttgttgggcttcatggtcgaggagacagctatccgtctcagttgagcggcggtcaaaagcaacgggttggaattgctagggcgcttgccaacaatccgaaagtgctgttatgcgatgaagcaacttcagcgcttgacccaaagacgacggattccattttggatttgctccttgacattaatgaaaaactgaacttgacgatcgtgctcattactcacgaaatgcacgttatccaaaaaatttgccatcaagtggcagtgatggaaaacggcaagattgtcgaacaagggccagtcattgatgtgttccgtaagccgaaagagcagatgacaaaggagtttgttaagcagctggcgcaaacgggggaagaagaacaatcgctttggcatcttcttgatgaacagagcgacggcacgattgtctctttaacgtttgttggcaaccctgctgaagaacaacttgtaacggaattaatccgacgttttccgatcgacattagcattttgcaagggaacatttcaaaattgcaacaaggctcctatggaaagctgtatttacggctattaggggcaacgaacgaaattgaagcagcgcttgcatacatccgcggcaaagaaatagacgtggaggtgattgagcatgatcgctaaatggtttccaaatgtcgtgtgggaagatgtgtgggcagctacgcaagagacggtttacatgacagtcgcctcagcagttgcaaccttttttattggcttgctcctcggcttgtttttatatttgaccgccaaaggcaatccatggcaaaaccgcttcttttataagatcgtagccgcttttgtaaatgtatttcgctcgattccgtttattattttaatcatattgcttattccatttacgcgggcactcgttggttcgatttttggcccaagtgcagcattgcctgctttgattataggagctgcgccattttatgcccgcatggttgaaattgctttgcgggaagtggataaaggcgtcgtcgaagctgcacaggcaatgggctcaacaaaccgccacattatctttaaagtgcttattcctgaatcaatgccagcgcttgtttctggcattactgtaacgaccattgctttgatcggttatacagcaatggccggaacaattggtgctggcggtcttggcacacttgcgttccaacaagggtttcagcgcaccaatccagatgtgatggttgtcgcgactgtcgttattttagcgattgtgtttgtgttccagtggattggcgactttttcacaagtcgattagataaacgctaataaaaaggagaggacgagaagatgaaagcatttttgaaaacactaggtgtcacaacagcagcaattgcactcgttgcttgcgggcaaggcggcaacgagcaaggcggggcaaatggagacggaggcaatgcagacgagccaacgaccattaaaattagcgcctccaatgtgccccatgccgaaattttagaagaggcagagccattgcttaaagaacaaggcgtcgagctggaaatcgaaattgcccaagactatgttttgccaaacattgctttaaacgatggcgatgtcgatgccaactattttcaacaccgcccttatcttgaagaacagcttgagcaaaatccggactatgattttgttgaagctggggccatccatttagagccaatgggcctttattcacaagaatatgacagcgtcgacgaccttcctgacggagcaacggtgatgatgagcgattctgtcgctgaccacggccgtgtgtactcccttcttcaagaagcgggtttaattacccttaaagagggcgtttcagttgatgcaaccgaacaagacatagtggataacccgaaaaatctaacgtttgtcaattctggcgttgctgctgagttgttgccgcaagcatatacgaacaatgaagcggacttgattgcgattaattccaactatgcgatcgatgctggcctatcgccaacagaagactctgtcattcttgaagaaggcgatgccgaaaatccatacgttaatttgattgtcgttcgcagcgaagatgaaaacaatgaagcgattcaaacacttgttgaggtgcttcaatctgaagaaatcaaaacatttattgaagaaaactatggcggagcggtcatccctgccgagtaaggaaaaaggctgccgttagcgacgcgctaacggcatttttgcttgtaaaaagacaggagtggtctaacaatgggcaaggggaaagatatgcgctatctttgctatccttatatgcgtgaggcgcaaacaactgtcgattttgaaatacaatctgatgcgctggcagttcggattggacaagcggctagcttagttgtgccgttagaggaattacatagtgatttactcaagttggtggaaatggtgtaccatttaaatggatcggtacgcggaaagatggcgatatccgctgctgatgtacataagttgagcgatctgtatgaccgctatgttgaagagacggaggaatcgatcaagcagtttgtgttgccgcaaggatcggcagctgcctgtgctcttcatgtgtgccgcagtgaagccaagaaaacggtacgtgctttgcatcgcgtcagcttggaacgagaagtgccagagaggctatttgattacgcccatctgttggcgaatgtgctgtttgtcatggctgtgtatgcaaacaaacggcaaggaatcgaggaaatcccatttgtgagcaaatcataccccgtaaaaacacgcaaaaaggagattaattaaatgaaaaaaaagcttttgttatcatcattattgcttatttgtgcggttggctgccaatcggacgaagacaagacagaggcccacgaagaacagccagaggggcaatcgtatacagtaacggatgacagaggtgaagacattacgtttgaaaaaatcccagaaacggttgtttctcttgctccgagcaatacagaaattttgtttgaacttggtgtaggagaaaaggtggtcggtgtgactgaatttgatttttatcctgaagaagcaaatgaaatcgaaaaagtatctgactcacaaacaattgatgctgaacgaattattgaattgaatcctgatgttgtcattggctatacgattggggctcctgatacgctcgaccctttagaagacgcagggattcccgtgtttgtgattcactcagccgccaactttgaagatgtttatagtgatattgaacaaattgcagaagtgatgggcgtaacggaaagaggcgaagaaatcataacgaacatccaagcgcaaatggaggaagtggccacaaaagtcgccgaagcggaagaaaaggacgtgtattttgaaattagcccatctccagacatttatacgacaggagccaatacgttccagcaagaaatcattaaagccgctggcttaaacaatgtgtttgccgatgaagaaggctggcttaaaattgacgaagagcaagtgattgaccgcaatcccgacttgatcgcaacaacggtcacctatacagaagacccagtcggagagattaaaggccgcgcgggctggggaggcattgccgctgtcgaaaatgaggaaatctatttgcttgaagcggacatcatggaccgtcctggtcctcgtatcggagaggcggtcgagcatttggcccaaattgcatacccagagaaattcgagtaaattgcatgctcctggaacaagtactgcatactaacagtaacttgacggaaagggagcagaattgatgaatcgtgaaagtcatactacaacagagcagcacttaggacgatacaaaaaaggcgtcggtacttatgaagaaaaaatgcccgctttttcccgaacatacaacgagtttacagaccagtgctttaaagatggggccttgtcaaaaaaacagaagcatttaatggcgctgggcatgagcgtttatgcccaagatgaatattgcatcatttaccatacaaaaggatgcgttgaccatggtgcttcggaagaagaattgcttgaaacaatagcggttgccaccgcctttggcagtggtgcagcctttagtcaaggagctacacttgtacaggaagcctttggtgaattcgcaaaagagctgcaataacgattggcaacagccactctctcattattgtttgcatgttattcgtttagggtagagaaaaatagaaccgcaaataggctgctcggtttgcttagagcttaaattgtagctttggtaaacgtttgtggtttaaaaacagggcataacaaattgagagaggggatgaagaaccattcataagatggatctatcctacaccactgagatggaaaaagggttgcagcagcggcatggaatgagctatgccgagtatgagaacagtttaaaaaaacgactggaagtggagaaggcgcggacaaaagagcattatgcatgcaaccgtcttgttgaatcactccattcctagtcaacgtagatcaaaaacagagcctcctgccctacagtgaaggctctgttttttttgggtaatttatcgggacgggctccttgaagtgtgtgtccatttagtataaaattagaatgagaatagattaataatcattaaaaaatgtcagcgaggtttgctggaaacagcatacctgcttaatttatggagggaatacacatgtctgtaccaaaccttaagattgagaatttacatgtctctattgacgataaggaaattcttaaagatttcaaccttgagatcaacggcggagaaatccacgcgatcatgggaccaaacggaacagggaaatcaacgcttgcttctgccatcatgggtcatccaaaatatgaaatcacaagcggttctgttacgctagacggcgaagacgtgcttgaaatggaagtagacgagcgtgctcgtgcaggcatgttccttgcgatgcaatacccaagcgagattagcggcattacaaacgccgactttttgcgctctgccattaatgcgaaccgtgaagaaggcaatgagctgtctttaatgaaatttattcgcaaaatggacgaaaaaatggacgttctcgacatggaccaatcctttgcgcagcgttatttgaatgaaggcttttcaggcggggagaaaaagcgcaatgaaattctccaattgctaatgcttgaaccgaaaatcgccattcttgacgaaatcgactcagggcttgacatcgatgcgctaaaagttgttgcccaaggtgtcaaccaaatgcgcggcgaagagtttggctgcttgatcattacccactaccaacgccttcttgactacatcacaccagataaagtccatgtaatgatgcaaggccgcatcgttaaatccggcggctctgaacttgctgagcgtcttgaagcagaaggatatgactggattaaagaagaattgggcattgaagacgaacgcgttgatgccaaccaagaagcgtaagtgagaaccagtcggaagctttcacgataaaacagcaaaggatggtatgtatgtcagttgagacgaacccactgatcggtccggataagttaaaagaacggtccgaaggaaaacaagaaccaaaatggctaacggacttgcgtctggatgcattgaataaagtcgaaagcctcgagcttcctaagccggataaaaccaaaatccacaattgggattttacgtcctttactcaggaacttagagaaccaaaggaaatttcaagcttggatgagctgtccagcgacattcagcaatttgttgatgaagaagcaactggaaacagcttgctaatccaagacaatggcaaaacgatctttcaaacaaatgctgctgaattagcagaaaaaggcgttgtgttttgtgactttgcgactgcggttaaagagcatggcgatctcgttaaaaagtatttattaacagaagctgtttcagccgacgaaaacaagctaacggcgatgcatgccgcattgatggaaggcggcgcctttatttacgtgccgaaaaacgtcaatgttgaagtgccattgcaagctgtttatgcggtttccgatgaaaaagccggtttgtttaaccacgtattgatcgtagcggaagacaacagctcagtcacgtatgtagaaaattacacaggctatggctctggtgcatctgtagccaacttagtcgctgaagtctatgttggcgctggtgcccgcgtttcctttggcggtgtcgatacgctcaatgaagatgctaccacttatgttgtccgccgcgcccatgttgaacgcgacggccgcatcgattgggcgcttgggcaaatgaacgacggcgatacggtcgctgaaaacattacgtacttggtgggcgacggctcttatgcagacgcaaagctcgtatcagtcggcacaggcgaacaaaaacaaaactttacgacgctcattaagcattacggcaaacattcagaaggctatattttaaagcatggcgttatgacggaacgtgcccttggcatttttaacggcatttcaaaaatcgaaaaagcagcaacaaaggcgcacggcgaacaaaccgaacggattctcatgctcggcgaacgtgcccggggcgatgccaatccaatccttttaatcgacgaagatgacgtaacggctggccacgctgcttctgttggccggattgacccgttgcaaatgttctatttaatgagccgcggcatttcacgggctgaagcagaacgccttgtcatccacggatttttggagcctgttgtttcccagcttccagttgcgtcagtccgcaagcaaatgaaaacggtcattgaaagaaaggcaaaacgatgaacgcaaaggagataaagaagctgttcccgatcctcgaccaacaagtaaacgggaatcctcttgtctatctcgacagcgccgccacttcgcaaaagccaatccaagtcattgaaaagctcgatgactattaccgccgttacaattctaatgtccatcgtggcgtgcatacgcttggtacgcttgctactgatgagtatgaaggcgcacgcgaaaaagtccgcgctttcttgaatgcgcaagacacggcggagattgtctttactcgcggcacaaccacggccattaatttagtggcgcaaagctatggaactgaccatgtcggcgaaggcgatgaaattgtcattacgccaatggaacaccattcgaatatcattccatggcagcagcttgccaagcggaaaggggccgtgttgaagtatatccctttgcaagaagatgggacgattgcattagcggatgtcgaaaaaacgataacggaacgaacaaaaatcgtttccgttgtctacgtttcaaatgtgctcggtacagttaacccaattgctgaaatggcgaaagtcgcccataaacatggcgcggtcatggttgtcgatggcgcccaagccgctccccatgtccacgtggatgtccaacaattagactgtgacttttttgctttctcggcacacaaaatgtgtggccccactggcattggcgccttatacggcaaaaaagcgctgcttgaagcaatggagccaattgaatttggtggggaaatgattgattttgtcggtctgcaagattcgacttggaaagagctcccgtggaagtttgaagggggaacgccaatcattgctggcgcaatcgggttcggtgctgcgattgattttgtcaccgatttagggtttaatgaaattgaacagcacgaaaaagaactcgttgactattcgtttgagcgtctcggcgatttcaaagatttgacgatctttgggccaaaagaccgtgcaggggtgatcacattccagcttggcgacgtgcacccccacgatgtagcgactgtccttgatgctgaaggaattgctgttcgcgcaggccatcattgtgcacaaccgttaatgaaatggcttgacgttgtcgccactgctcgtgccagctattatgtgtacaatacgaaagaagatattgatgctctggcaaacggattagtcaaagcaaaggagtattttagcgatgtcttctcgtgatctcgatacactttaccggcaagtgatcatggaccactataagaatccccgcaaccgcggtgagcttgaaggggacacactgacggtaaatttgaacaatcccacatgtggggaccgtgttcaagtacaaatgaaagtagaagatggaaaagtagaccgcgctgtatttacaggggaaggctgttccatcagccttgcctccgcttcaatgatgacgcaagctgtcaaaggcttaaccgtcgaagaagcgctggcgctgtctaagcttttttcagatatgatgcaaggaaaggactatgatgaaggcaagtttgacttaggtgacattgaggcgcttactggtgtaacaaaattccctgcacgaattaaatgtgcgacgcttgcttggaaagcgctcgaaaaagggctgaacgacacgcattcatcataatttaggagggatatacgtggcaaaaaatatgccagatatcggagaatacaaatacgggttttcagatcgtgacgtatcgattttccgttcaggccgcggcttgacgaaggagattgttgaagaaatttcccgtatgaaagaggagcctcagtggatgcttgatttccgcttgaagtcgctcgaacaattttacaaaatgccaatgccacagtggggcggcgacctctctgagctaaactttgacgacatcacgtactacgtgaaagcttctgacaaaacggaacgttcatgggatgaagtgccggaagagattaaaaacacatttgacaaattgggcattccagaagcagaacagaaatacttggccggcgtttccgctcaatacgagtctgaagtggtttaccacaacatgaaagaggacttggaatcattgggcgtcgtctttaaagacacagactccgctctaaaagagaacgaagacatctttaaagagtactttgctacggtcatacctgctgcagacaacaaatttgcagcgctcaactcagctgtatggtctggcggatcgttcatttatgtacctaaaggagtcaaagttgacacgccgctgcaagcgtacttccgcatcaactcagaaaacatgggtcaattcgagcggacactcatcatcgctgatgaagatagctctgtccattatgtagaaggctgtacggcacccgtttatacaacgaactcgttgcacagcgcagtcgtcgaaatcattgttaaagacaatgcgtactgccgctacacgacgatccaaaactgggcgccaaacgtctacaacctcgttaccaaacgggccgtggctgacaagggcgcgacaatggaatgggtcgatggcaacattggctctaaattgacaatgaaataccctgctgtcatcatgcgtggtgaaggcgcaaaaggaaccgttctttcgattgcgattgccggcaaaggccagcaccaagacgcaggcgcgaaagtaacgcatcttgcgccaaactgttcatcaacgattgtatcaaaatcgatttccaaacaaggcggcaaagtcacataccgcggcatttgccactttggccgcaaatcagacggatcgaaatcaaaaattgagtgtgacacactcatcatggataaccagtcgacatcagatacaatcccttacaatgaaattttgaacaacaacatcacacttgaacacgaagcgacagtttccaaagtgtccgaagaccagcttttctacttgatgagccgcggcgtttctgaagaagaagcaaccgaaatgatcgtcatgggcttcatcgagccattcacgaaagagctgccaatggaatacgcagtcgaaatgaaccgcttgattaagttcgagatggaaggttcgattggataatacaagaataacccttgtcacataacatttgtgacaagggtttaacttgttattttgtcatttttccacggtagtatacgctggtccttgatggccgatttcccttggtaaaatacgatgacctggccaagatgtcaattgctattctgctagacaacaagtaagccacccattaacgggtggctttttcacgtttttaagattgaaactgttcggcttcagtcgatcccttcagggcagtggttgatgaagtcccgcctgttacgacttgggcgacttcatcaaagtagctcgttccgacttcgcgctgatgccttgttgccgtgtagccgtgggcttcgctggcaaattcagcctgctgaagatcagagtacgccgccattccgcggtgcttatattggcgggataattcaaacatgccatggtttaaagcgtggaagccggccagtgtgacaaattgaaatttatagcccatttgaccaagctgtttttggaagttcaagatggtgtgatcatccagtttggctttccagttaaacgaaggggagcaattgtaggcgagcagtttgcctgggaatttctcatggatcgcttgtgcgaaccggcgtgcttcttcaatattcggctcagacgtttcacaccaaatcaagtcagcatatggcgcatatgccaatcctctcgcaatcgcttgatcaagacctgactttgttttgaaaaacccttccgctgttcgttctcccgttaaaaacggtgcatcatatgaatcgacgtcgcttgtgattaggtcagcggcattggcatctgtacgagcaataagaatggtcggtactcccatcacgtctgctgcgagacgggcggcaatcaaattacgtactgctgtttgcgtcggaagcagcacttttccgcctaaatgcccgcactttttctcagaagatagctgatcttcaaagtgaactcctgcggcgcctgcttcaatcatgcttttcattaactcgaacacatttagctgtccaccaaagcctgcctccgcatcggccacaattggggcataccaatcgatgtcttcttttccttccatgtgggaaatttgatccgcgcgttgcagcgtacggttgatttttttgacgacttcgggtacgctgtttgccggataaaggctttgatcaggatacatactccctgccaaattggcatcagcagccacttgccaaccgcttaaataaatcgctttcaatccggcttttacttgctgcatcgcttggtttccagttaaagcgcctagcgctgggacgaaatcctctgtatggagaagtttccacagcttttccgcaccgcgcctggcaattgtgtattcaatctcgagcgtgccccttagccgcataacatcagcagcctcatacggccttatgatccctttccagcgttcttcatgctcccagctttctacgagttgtttttcttctagcatcgcacattcccccaattatacgttttttcatctagcttcagctgcccaattaactatcctgccattatcaaaacgtgtcatcgttgcgtcctccgtttagcgatatgaaaatttcccgctctgtagcattcacctccgctgtacacatagtgttataaaacagttctggctactcaccttttttagcaaggcagcgctcacattccataaagtaagattcagcttgctcttccatctgttcaccacattcaggacatgttttcctcggaagcgttctgtaaaagtcaattggatttttcaagctcattggtctccctcctttttatataacagtatgttataattatttctgttatggtacagtatacaacgcaaaaatgaaaatgtacacaccttttttaaaaaatttttctattttttcattcactaaagaggggacataaggagagaggaggaggacaatgaaaaggaatcggcgacgacgaatataaggatgtcggggcgatacaaagtgagctagctattaaatcatgcaaattaagaaagtatttaataacaatgttgtcctagcacagaatgaatgggatcaagaaatggtcgtaatgggcaggggcttggcttttcaaaaaaaggcaggtgaaacgatcgatacagctaaaatcgaaaaaacatttgttttggaaaaaaggggtgtgtcggataagttagcgaaattattacgagatacgtcagaactatatttaaacattgcctctaagattttagattatgcgaaatcacaattgtcatataaactggatggctatttgtatgtagacttggcggaccacatgagttttgcaattaaaagcctatcttaaggaaaaaagtattgacattgaaatggaagctggcgatcttgacctcctccgtgaacatacggttgattatatgggcatagttactacatgttttttgtagcaagcacggatccagaacagttaaaatgcaaactgccaacaatctctttgcggatgtgaaaaatccgtacttggaggcatctgagtgggggtggcaaattgatccaattggtttgcgcacggtgtgcaaccaactatatggtctgccaaaagcctctatttatgttgatcgcgacagcaatggcaaaggatcaaataaacgctataaaaagacaaattttagctggtaccaaaatgtcattgccacaaatggagaacagctttagctactacaagcgacttgagttttaagctcaagtcgttatttgcggtgctacacgaaaaggttgatttataataaagggaagcgttgcgcgtgcaggtgctcaaaatcaaacaatggcgctggctaggaaggaagaggagacggacaaatgaagcagaataagtatgacgataaggcattctttgccgcttatgaaaaaatgcctcgctctgtaaaagggcttgccggtgcaggagaatggcatgtgttaaaggcactattgcctgatatgcgggggaaagccgtgcttgatttaggctgcggttttggctggcattgccgctatgccagggaacaacaggcgcgttctgtagtaggcgttgatttatcagaaaaaatgctggaaaaagcacgagaaaaaacaaatgacccgttcatttcttatttaaacatggcgatcgaagacatcgatttcccaagggcacagttcgatgttgtcatcagttcgctcgctttccactatatcaagtcctttaggccaatttgcaagaacgtttacgattgtctaaaagccgagggaacagtcgttttttcagtagaacacccgatgtttacttctcgccaccaacaagattggtgttacgacgaccaaggaaaccgccagcattggcctgttgaccattaccaatcagaaggaaggagggaaacgtcttttttgactgaacaagtgattaaataccatcgtacactttctacctatatcaatgatttgatagaggctggttttcggatcaacgctgttaaagaacccactccttctgaggacacatctgcccttagccgggaaatgaaagatgaatggagaaggccaatgtttctaattatttctgcgcaaaagccataactgtaaacgatgaatgagtaaagcgcttacgaaaatgatataaatgcgtcacattgccatatacgccgttcccaagccatgctaaagtataagaaaaaggagtgtcttgctttatgtatacagcaacgccttcacgttatgatgatatgatatacaaccaatgcggaaaaagcggcttgaagcttccagctatttcattgggattgtggcaaaactttggcgccgacacgagccaggctaaagtaaaagaaaaaatttttcgtgcgtttgatttagggattactcattttgacttggccaacaattatggccctcctcctggttctgccgaagcagcaatgggcacgatactaaatagtgaactaaatcgctatcgggatgaactcattatttcgacaaaagcaggttacgacatgtggcctggcccatacggggatggcggttcaagaaagtacctcatctctagccttgaccaaagcctaaaacggctaaatctcgactatgtcgatattttttaccaccaccgctatgatcccaacacgcctctggaagaaacaatggctgcacttgacgccattgtccgccaaggaaaggcgctttatattggcttatcgaattacgggcctaaagaaacaaaacaggcggccacaattttaaaacagttaggcacgccttgtgtcgttaaccagccttcgtattcgatgttgaaccgttggattgagggagggctgcaagacgtcctcgctgaagaaggaattggcactgtcgcttttgcaccgctggcgatggggcttttaacttcaaaatacttgcacgctattccagaaggatccagggcggctaaaaacgattggtttaaagcaaatgtgaccgaggagcaagtagggaaagtaaaagagcttcataaaattgccgagaaccgcgggcaaacaatggcccagtttgctttagcatgggtattaagggagggcagcgtcacgtctgctttaatcggggcgagttccatcgaacaaatcgaagaaaatgtagctgcattgaacaatttgtcctttagctgcgaagaattacatgcaattgattcaattgtaggcagcgataaatgatgaaaaagaggagagtgatgcgtactctcctttttttgtgaccgctaggcttgaatgggtgtagcgatcgaggcaacttttaaggaatccatcatccagttattgctatggacagagccgtggcaaacgattacgctaaggagcataaggcaagaaaagaggtgtttgcatggaacggtacaaccagttggcacaagcttttgcgtacacacctatccatgtttatggcgtctataagagcaggcttgaagccaatcgcctttaccgtggccatgttgaccagccgacggcttatggcgggcttatttttgggcttcgtggcagcgcacgctttacatttaatggttctaattcaatcgaagtcagccaagggaaagcaatcatcggcggctatcaaatgcgcttagcgttggaagtcggtgaaacgggctgtgaatatgcgcttattcattttttagcagacggaaggacgccacaggcagctttgtttcaaaaagcccaccaactagagtacctatttgaaccgagtatgttgcaaatggttgatgagcttttgcaagctgatggggcgccaggggagatggcggcactgcaaaaaaaagcgctgttctaccaattgcttgcacatgtccttcgattagcgcgtttgcagcagaaacctaaaaacagtgaagtgatggaagagacaatccgttatatccatgcccattaccatgaaccgataacattagggcaattggctgctcgttatgatatgacgcctaaatatttttctgccgctttccggaaatgcacaggggttggcccgattgactatgtgatccattgccgtatgaagcgagcgcaccaactactaatgacaggggcgtttactgtcagtgcggttgcccgcagcgtcgggtatcaggatccctattattttagcaggttgttcaaaaagcagtttggagtcgctccaagctacgttcttctagaaatgaagaaataatccatctgtaaaacaggaaactgtctattttacatgaagtcattccttgttatcattttaaatgataatgattatcactattaatagataagaacgaaaggaacgtactttatgcaccattcacttaaatcacttgcttcaagccttttgctgttaatgcttctaggagcttgctcaggtaatgtgggtaacgatgccaatgacgatacagagaaaagcagtgagcccactgtctcaagcgcgtttccgcggacattggaagatgcgaacggagactttactcttgacaaagcgccgcaaaaagtagctattgcccattggggatttgtcgattcttttttgctttttgacacgccttctgctgcggttgtgctgcctttttcagcagaacagtctgttttaaaaacagacgtgtacgagccttatgtagaaacgttcgacgagctagaagtggtaggcgaaaaccagcaagtaaatttggaagcgttgcttgcctatgaaccagatttaattattgcaggaaaccaagtaaatgaggatatcgaccaactgcaacaaattgcgcctgtttttgtcgtagatgaggaagaagtcaacgtgtggggagactggcctgcactcgtgtctttgtttggcgacattcttggccaagaagatgttgctgaatcatttattcgttcttttgaacaaaaagtcgaggaagggcgcgaaaaagtagcgaatatagaaggcgaagttgcctttttacaagcacgagaagccactgcttggctgcaaggtacgaactacttgccattgtactatgaccaattggggctgtctgttccagatgcatcaattatggaagaaggggcagaaatatctcttgaagggataagcgaattaaaccctgatcaccttttcattggctattttcaaagagacagcgactcttcttcttcaatcatccatgaatgggaagagacgaatgtgtggaacagcctgcaagcggtagaaaaaggccaagtatatgaaatgaatggcgagcttgcccttggctacgggccaatcgggcaatcgtacgggctcgaccaagtggtaaaagcattggagtgaaaaatacacagcctgctaaacgctttagagcgcttggcaggcttttcttgtcatgtagaacagcaagtacgtcggtaagcaggaatgtcgctgatgtaactcgaattgagagtaaaattgctagcaaagcagtgtacgataaaagccgatgcatttatgaaataaggggtggtagcatgaaaaataaaagctgttatgcaaatgtaatcttgtcgtctgaaataaaatctgttcaaatacggaggacttatggaaccaacaatcgaattagcgagaaaattaatagttgaacagtttccagagtggtcaaacttagagattaaacatgtgcaaaaaagcggtcatgacaatcggacttttcgccttggcgatacgatgagtatacgcttgcctagtcatgaggcatacgcgcctcaagttgagaaagaggcaaaatggttgcctatgcttgcccctcattttgacttgccaattacagtaccgattgcgaaagggaagccttctcgtttgtacccgtattcttggtccgtcaatcgatggattgaagggcaaactccggacagaagcaacactgatttacaacaattagccgttgatttagccgcctttttaaaaaagctatactcgattgatagcacaggcggccctatagccggcaaacataacttttttcgtggcggagatttagcagtttataaacatgaaacagaaacggcgatcgcaatgttaggcgagcaaatcgatggcgatgcatgtgcacacgtttttaaagaagcattaagctcaaaatggagcaaaccgtcagtctgggtacatggagatgtggctccagggaatttgctagttaaaaaccgaaaactagctggcgtcattgatttcggcagttcaggtgtaggcgaccctgcatgtgatttagtgatggcatggacattttttgacaaagacagccgaaacgtatttaaagagaaaatcggtcttgacgcagatacgtggaaccgcagcaaagggtgggctttatggaaagcgttaattacgtacaattccaaagtcgatgacgttcgtcaaaatgctcattccaccatcaaagaaatcttacaagattagcgagttgaaagagagagggttagatagcctctctctttttttacaggatgttccagctatgctaggcggcggtcaactgcaatcattgaagcgattagaggcaactgttttagcccacagacaaggctcagaaacgaaccaatcgctttatcggtaaaccaacagcacgtttccgcactgaaacacttttgcctcaactagtgttagcttttcgtagtattgttaaataaccgttgtccctatccaataaaacaggattgacgataaggcggtactcatcaattaagtcatgtttcataaaggtttgggcaatgtttgcaccggcaaagagggcatattttcgattaaaataataagccttatttaacaggataaaagtcattcatttgcccgtttattctaatcaaaaaggaggaaaatcggactgttttaacacgatcttattgtatggtaaactcgacaatagaaggatgttttttccaagggttatatctccaatattgacaaaatgatattggtttttaaatacataaatttaacattctgcgataggtcgagaaatggaggtagtgaacaggtgagtggtgaaattaagttaaatccaaggattgtccttgatcaagtgagcaagcttcgtgaccatattaatgaagtaacaccaagtcagtcagcttataccaatgaaggaacgatactcgaatcgattgaactagcaatagaaaatatggagaatttacaacagttacttaccgattatcaggcattggtgcttgataatgccgatcatattgaaaaaatgatcaatgacttcgttgctgcagaagagcaagtagccaatcaaataaagggaggataggagcatgggccaaaaatcacttgatgcggcacagacgattgacatgcttcaagcaatggcttcagaaacatccgatcaaaatggccagtttgccggattcagtagttggatgatcagtcaacatttacaatcaggaggcaggttaagttcaggaaagacggcaaccgcaatagccaacttttggagtgaagcacacggaccgtttttaaatttacttcgagatgtgatggatgatttttcaaacaaacttgagcaaatacaaaacgccatatccgatgcttttacaagtgaagctgtgttaaaagaatcgtttatgatggatcaactttatgatgaactagatcaattgaaaaacgtagttcgtaattttggagatgcgctagcagacattaaaaacgagtatagcgacgtattggcaatgccgtcattcgatgactccaaaatcgaacaaggactgacgaaatcgcaagaaaaactccaagaaaccaccgcctacttgtacgaaatggatgcaaaaatgaaaacgccaatggagtatattgccgaagacattgcattaatgcatacatacgttgacagaattcggtcaatgatctcaaacggttctgtttcgattgaaaacttctcaagaggtcaaataaaggacgaagaagcgtataagaatatgaagagtgcgtggactgaaagaaaccttcataatacgatggagtacatcaatttatttttaggaaaaccttttggagtctttgataattatattttgggaactgtagatatcctttctggggcggcaataggtctcagtcattatgcaaatactgggaaagtatcattcaagcctaaatctattgtctcatcacacctaagtatgtataaaaattccgcaaaaataatagataagtttactaatatatataatggagccaagtcagttgctaagaactcaatagaagctggttattctagaatagcacagaatacatctgcgcagaaatttagtgatatagtcaaaaaagtggaatccaaggtatctctttttacggaaagtaaagtgggaaagtttttaggcccagtaggagttatgttcactggtctaagtcatgtagatgagttaacaagccctgataatagggataaaacccaagcagtgaaagcggcaagattcataactggagtggcagtagaagctggaggagcggcactaggtgcctcaattggggcagcagtattagctcctgtaccagggggaccaattataggggctgtaataggtgggatagttggtggtgaagttgctggaaaggctgtagattatgtgaaagatggagcagagtatgtagtttcaggtcaaatgttagatgacatgagacgagtaggaaataatgtagtttcagcagttagcaataccgttgattcagtatcaagtgtagcggatgatctcatagacaatgtaaaaacagttgcaagtgatgttggtgatgcggttgaagggttttttagtaatgcagctgatagtgtatctggttggtttagataaaatgaataggagatggtacttccattggcaaatattattagttacataataggtctagccattgcttttcagataattacagctatgctgcttctcattctaggtaaaaatacgccttttgttatattagttaataagctatatgaagaaacaccgagaggtacatacgataaaataatgaatgcattttattatgcttactttggtattgctgtacttttatttcagattgcaatcgaaaggtttggaggcataaaagggaggttggtttttcttttagaagggatagggatacttgtggtacttgctattttagccaacatcccccacatgttctaaaaacggcattttttgaaaggagaaaaaagatgaagccctttatgcggtgtacgacggaggaatggatgcttcttttgacgatgtgtggctatgaggtgttggccaagtcgttaggagaggaagtgtttggcgaaaaatcagaagagagctgggaaacgttgtttgaatgtgcagcgcatcaacttatgcttaaaggggtttgggatgatgagaaggcttcaaaggatgaggttccgcttgcggatgggctgcaatcttttattcgcagtgtagctgaagcaaagcaattgatccgtttatcaaacccactgaccaatgaagcattattatttaggcgtatcggcgacggccaatggattgaacattacataaagcaagaaattatccaagagtttcatcctgttgatgcaaagagtatagagaagaacatgcatcagttcattgaatataaagatttagaaccgagcaacgagattgaattcacgatgtcaaatggcgcttttactgcgctaagtgaccagcggcatgtaaaagaagtaaaaatgtactggcttgaagcaactaggcaaaatgaagcgtggtttgatgaatttgcagaagcgcttttagcgaatgattggaagttttttaatacaagtgtgatccatgtttcacttgatggagaacagacagaaacagatttgaatgacctattgtttcatatgcctgcacgagatggagtttggtttgtaagatacaaagatgttcattcaaacgaagatgtcattattcaaaaaacatctttttctaaatggaaagaagtgtgtaacgaattccttgaacggacagtcttccacgctgccaaataaaggagggtgttttatgaacatatacaaaacatcacgagataagaaggttgtatttggttacagtgcgttggttgtggggttgactgctattatggcgattgtgttcatggtcgaagactccatggggcgtttattgttttttggccttttatttatgattggaatgatttattttgttggcgggatggtgtttattacatatgagttgaaagaagagggtttgtttgttcaagctggtttaattagccgtttttactcttataaaagcatgacagcgcttgaaccgatgggcagccctttttctggaaaagagcgtatcgttggctcttctcaaggatttaatatcaaacataatgggccaaagggagaggtgaaaatctcgcctgagcggatggaagaatttaaacaggagctgctcaaacgtgcgccacatttagatgtgcaagtgaaagcagatagtcgataggaggaagacacatgtcggttgaattttatcgaaatcgaatacgggagacggaaaatgccatccaagcagccaatgaaaaaattgctcgcttaagagcgtgcagggcccacttaattggacaggaaattatcatgggcgatacaaaacatacttttaaagaaccggaattaacgaaagagaattggtatggcaagcatgcggatgaatttgatgctgagcgtgagtcggaagtggtgggcccttatcaagatctcctcaatgaagtcggcaatacaattgaaaaggcgacgaacgaaatcagtgctacacaagatgtcatcaacttccaaagtagtttgctaagcaattatcaaatcggtcttgaacgggcgatcgagagggaaaaggaagagtaggattgccgctgttttttggtcgccagcatatttatgcatacaaacgctcagagaatcgttctctgggcgttttttggtttcctttcggtaagattgcagcaatgtatcaaatctgcgtttcgtaagtttgtgtatgtggaactaacattttacaagagattgcggtgaactacccaccacttaccacccttacaggctgcttgaagtgggggcttcttgggtaatcgccacttttggtagctgacgaaatggaccaagctaaccctcttgttccaagagtttatcgattcattaggcagtggctaataagcgaatcccttcttcgctcgaccgatattcatctcccccttaccgcactgctacgcccttcacacgcttgaagggggagacttcttttggaaatatgttaaaatagagagaaatgtgcgggaggcgttttttagtgatttacataggtttaagcggctggggtgaccatcatcgcttatacgaaggcgtaaagccagcagagaagttgcaaacgtatgcgggctattttccgattgtggagttggatgcctcgttttatgccgttccaccccaatcgtcgatccgaaagtgggtagacgaaacgccggcgtcctttcaatttgttgtcaaagcgtatcaggaaataacaggccatcagcggggagagtcgccttctccttttcaatcgaagcaagagatgttttctgcatttatagaatcaatccaaccgatggcggaagcaggcaaactagcgatggttttatgccagtttcccccttggtttgatgttcagaaaaaacacgttgcttggcttcgtgtagtgcgcgaacagttgaaagattttccggtcgcgcttgaattcaggcatgaatcgtggtttctgcctgcttaccgtgagaaaacgctcgcgttgatgcgcgaggaaaattggattcacagcatttgtgatgaaccgcaagccggggcacgctcgattccaactgtgctcgagccaaccgaccgccaaaagacattggttcgtatgcatggacgcaatgtccatggttggaatgggccgagcaaagggcaagaatggcgtgatgttcgttatttgtatgattacaacgaacgggagcttgctgaatggaaaacgcgccttcagtcgctgcgacaacaatgtgagcacatttatgtggtttttaacaacaattctggcggtcatgccgcccaaaacgctcgcgcgttgatcgagatgatgggcatcgaatatacggacctggcgccaagacagttggatttattttaacagcacacgaacagcaagcgtctaagcgttgtgctgattcagggtggcactagctttttgggtgtccatatttaaatatgattatacagaaagctggttttttaatggaatatgtactgctcgtattagtaggttttgctgcagcggcgtttgggagtttgctcggtcttgggggcggtgtaatcgtcgtgcctgctttgcttggactcggtagcttgtttgctgctgtcgacgtcatttctccgcaaacagctgcaggcacgtctttatttgttatgatttttactggcatttcttctgtgctggcctatcataaacagaaaacgattgattggaaaagcgcacttctttttttgattggtattgttccaggggcgattcttgggactagcgccagcaaagtgttgtcaacggattcgtttatggtttattttggcctttttatgctcgttattgcgggtagtttatttttgcggggaaagctaaaacgcaaagatgcgcctgttaaaggggtgatccgtgagagcacggatgaagctggaaatcgttatgtttatggctattcgcctactgccgccattgtagtcagcattggcgtgggctttttatcgagccttttcggcgtcggtggaggggcgttaatggttcccgtcatgattgtctggtttgggttccctgctaaaatagctgctgcaactgccatgcttgttattttgttttcggccgtgtcaggttcagctgcccattttgcggctggtcacatccactggctttatgcactggcgcttattcctggcgcgtggtttggtggcaaggcgggtgcttggctcaaccaacgaattcgctcgaacttgctcgtgtggttgatgaagcttgtctttatcgggcttgcggtgcagtttattctccaaggcctgctataaacaccacacatcaggaacagatcgaaataagaggaggcgactttgtgaccaagacggttaccatttatcatacaaacgacatccacagcggttttgccacatggccgcggattgtctcatatataaagcggcatcgccatccccttatgcgctatgtcgatttaggagaccatgcagacagggcaaacccgcttacagaagcgacttacggaaaaggaaacattgagctattaaatgaagcaggcgttgattttgccgtgcctggcaacaacgaaggtgtgacattttccaaacaaatgctttacgagatgtacgagcacgcttcattccaagtgcttgccgccaatttaattgaccaacaaacagggacttatccgcactggatcaaaccttattggatcgatgaaatggaaggtggcattcggatcggctatattggctacactgcctccatgatccatttctatgagcagttgggttgggatgtcgctttttctatagaaagacttcgccagttggcgcaacaagttgctgccaagacagatgcacttgtccttctctctcatctagggctgccacgggatgaacaaattgctgctgaaattactgaaattgatgtcattatcggtgcccatacacaccatgccctcccatatggaaagcgcattagtgggaaactgatcgctcaagcgggcaaacatggccaatacttggggaaattgtcgcttgaatttgcagaaggaagccataaatttctttccgcagaagaagaactgcttgacccccggaattttgatgaggatccgggtgcgcgtacgctcctacagtcgttgcaaacaaaggcgcaagctgctttaagtgcgcctgcggccgttcttacacgaaagctggaagtcaaatggttcgaacattcggctgggccgcaagcgctgtgtgacgaactgagtgcttggtgcggcgctgagcttgggatgctaaatgcaggcgtgctgttggaaagcttgccggaagggccagtcacgtacggtgatcttcatcgcatttgccctcatccgattaacccgtgcattgttgagttgaccggtggggaactgaccgaaacgattgagcgtgcgcaaaccgatgatattgtacaattgcagttaaaaggatttggtttccgagggaaagtgctcgggacgatggtgtatacaggaattgacgtcaagcctgaaggcctcttcgtttgtggcaaaccgattgttgccgaacacatttacagactggcgacattggacatgtatacgtttgggtttttgttcccgaaaattgccgaggcgaaaaagaaaacgtatttgctccctgaatttttgcgcgatattctgctggacatgttgaaaaaatggcactgatttctttgcctgctcatatgttgtggtgaaacaacttacaaaggagcggggccaatgattgatgttcagccaattacgattgagaaggaaacgtttgtcgccattacggtcaaattgccgaaaacaaactttatggccgtgacatgcgacacaggatacattatgtgtggggcccttgacgtgaagctgttaaacgaaaagctaaaagaacgaggaattatcgcaggacgtgcggttggcgtgcgcacaatcgaacagttgcttgaagcgccgctggaatctgttacactcaagtgtgaggagttaggcattcacaaaggaatgacaggaaaagacgcgcttataaaaatgaaacaatcgatgtaaatgaattgaaaacaggagttgacgtttttatggaacaatacttgcagttatgcgagcacgttttgcaaaacggctcgccaaaatcagatcggacaggcactggcaccattagtgtatttggttaccaaatgcgctttgatttagaaaagggttttccaattgtcacaacgaaaaaattgcatatgcgttcgatcatccatgaattgctttggtttctaaaaggcgacacgaacatccgttatttgcaagaaaatggcgttcgtatttggaacgaatgggcggatgaaaacggcgaccttgggcctgtttacggaaaacaatggcgctcctgggaaggggcaaacggcaaaacagtcgaccaaattactgaagtggttgagcaaataaaaacgaatccgaattctcgccgcttaattgtcaatgcgtggaatgtcgcggagattgaagaaatggcgcttgcgccatgccattgcttgtttcagttttacgtaaacgacggaaaactttcttgccaattgtaccagcgcagtgccgatatttttcttggcgttccttttaatatatcgtcttatgccctgttaacgatgatgatggcccaagtgtgcggattaaagcctggcgaatttatccatacgtttggcgatgcccatttgtacaacaaccatattgaacagacgaagcttcaattaacgcgtaaaccaaaacagctacctacgatgcatatcaatccagaggtaacagacctgtttgcgtttacttacgatgattttgaactgaaacattatgatccttatccgcatattaaagcagaggtgtccgtatgattgtgtttgtttatgcacgagacgcccactatggcatcgggaaagacaacggattgccttggcatttgcctgctgatttgcgccattttaagcggacaacgacaggtcaaacgattgtcatgggccgaaaaacatttgactcaatgggtgggccattgccgaaccgcaaaaacgttgttctcacgagaagccgttcctttcaagcagaaggagcggaagtcattcattcactcgacgatgtcctgcaacttagcaaacaggaagcgatttacgtcataggtggagcggagatttttgcgctgttatgggatatatgtgacaaacacattgtcacggtcattgacgaaaaatttgaagcggatacgtttgtcccccctctttctgagcaagaatgggagcttgtggagacagtgcctggaccaattgatgaaaaaaaccgctatccccacgaatatcggacttacgtgcgtaaacaagcaaaataacaggtaagtgtcccctttcttttgcatagagatgtaaggaaagggagggggacacatgaaacggtttaaaggaggcccgattaaaggccaaaaacaagaaagagggccgcttccttttcgctatgtgctgctcatttcgtccgtgctattcgcgcttttgtccttgcaagggctttggtttgtcgaccaacagctgcgcccgattatttcgcaaattgcccatcgggaaatggagcggattgcgacgtatacgattcagcaagcgttgactgatgagctaggccaaactgacatgaacgatatgctcattactgaaacgaacggagacggtcagattacgtatgtcactttggacactcaaaaatacaacaagctcctcggtaatgtccagcaccgtgtccatgaggcgataaatgcaatccaacgcaatgaagacaatacatacggcgcaagcgaaggcacagtggcgacgatccctttaggaagagcgctcaacaactcgttattaaacgatgtcgggccaggcattcccctgcggtttgcattgattggcgatgcaaaagtaggcatgaaggacgaaagcgagcagctgggcattaacaatacgaggctgtctttttatgtcacgatcgaagtgggcatggatgtgattttgcccttttctgagacggcagatacagtatcggttgagttgccagcaggttttgcctttatttctggggaagtgccgcagttttatggaggccaactgcctatcgtcaattatccagctcttgaggcgaatacagaccaacaacctgaggaagaaaatgacagtcaataaagtcgtattttgtcgttgtctggcataaaaatatgtgataaactgatacagaattgaataggaacacctcatctgccagatggggtagaggcgcaaacaccatcagtaccttttttgagcgaaggcccgctttgaagaaaagggaaaggggtttttgccgaagcaaaaagcagggcctgctgctttttagctgggctggcattgaagaagtgtcggactgtcacagggaactgtggagaactactatggatgggactgtttattgtacgggacaatgatggaaatctccatcattgtcttttttaatagagcaaacagccacgttaaaggagaggtttttttggaacatgcatttggatggtggtcgctattgccgccgattctggcattaacgctcgtgatattgacacgaaaagtgttaatctctctcgggattgcaattttggtcggtgcctttatggtgtttgaccaacatatagggcaagcactggctggcatattccaaacaatcgccggattgttgttttcctttgaagcagtcgattcgcctacattttccggtgttgggcaagccattgcggatgcacggtttgcattaaataattgggaattgtatatcgtcttattcttaatgctggttggcatggtcgcgagcttaattacattttccggcgggggacaagcattcagccgctgggcgtcaagacggattaagacgagaaagtcatcgttgtttttgccatttgtgttaggctttgtcatttttattgatgattattttaacgctcttactgtcggcaatatgagccgaccattaacagaccgataccgtgtgtctcgggcgaagcttgcttacattgttgattcaacgtcagcgcccatttgtgtcatcatgcctttatctagctggggtgctttcattatcgggacgttggcgactgttttaactgctaaccagttagaagaattcggcgcattccaagcatttttatacacagtaccgattaatttttacgcattaattgcgctgttgtttattgtccttatcattttatttaacatcgacattggcctaatgaaacgccatgaagaccgggcaaaagccactggtgaattgacggacccggcaaaaggcgatgtgcctggcgatttagatgaagcactcgtcatgactaatggccgcgtttatcagctatttttgccgatcattgcccttgtcattgccaccacttcccttttgttttacactggcgcaacggcagctgctgcggaagggttgccggcgacaatgctcaatatgctcgaatacacggatatcggcttttcgctccttctcggcagttgcattggttttatcgttgctgttgcgacaacgttagcgtctaaaccaaatttgccagacttcagaaaagcattgaaagctggtttggcggcaatgatgccggctatttacattttagtgcttgcctggacgacgattgaaatgattaatcgcttaggaacaggcgcgtttttggcatcattagtgagtgactctgtcaatcctggctttttgcctgtaatcctgttcttaattgcttgtttttctgggcttgcgacagggacgtcgtggggaacatttggtattttgctgccgattgccgggcaaatggcagcactgattgagccgtcgatggcgatcccaatgtttgcagctgttttagccggttcgatttttggcgaccacatctcgccgatttccgatacaacggttttgtcggcagctggttctggcgctcatcacatggatcatgtgatgacgcagttgccttatgcggtgttaacggccataatcgcaggtgttgcttttctcgtccttggcttcttcggcccgatttttgcttggattgctgctggtgccctcctcgctgttacggtgttggcacttcaagcgtttaataaacaagcttcaggcaagaaagcagcccaatcatcataaccctaacagcctgccaggatctcgactaatgcgagcgactggcaggcttatttgtttacgaattgttttttttcgcgtttttgtccgcgcgctcccattgttttaacgaaggaaatgggtcaaatgaccattcgctgataccgttatccctgtacattccgtaatgaagatgaggcgggaatttaccttgtgttcctggtttgccgtagcctgagctgccacagtaaccgatgacttgtcctgcctttacaatcgaccctttctctaatcctttttcatagccatttaagtgggcgtaatagtgataaatgttgtcaaggtcgcgtatgcctacacgccagccgccgtaaggattccaaccaatcgtttcaacgatgccgtatgaagaagattggatcgggacattgtaattggcgaaaatgtcggtcccttcatgaatgcgcctaccgccccagcctcgcttggctccccacgtgctacggtagctataatgatggtgaaggggcatgacaaaagcatgttgatgtaagtcgagcgtttgaaacgtttcgtatactttggcatggccactgacaatgttaacgctttgttcacgttggtaaaaatgccagagggcaatacggaaatcctcatctgagtaaccgtgagactctaaatagcgagcaaatgtataaaggacgtcttcatcatcctcaatgtttgctttcccatcgccatttccatcaaggccgattccttcaaataagctgattgtcgttggatcattgtcgtttatgtttggattaagtgcgccaacccattcttcttttggatagtaaatagacacaaggccttttgcttgttctcggtcccttaacgctttccgtaaaccccgttcgtaggagtcgacagctgctaaatagggccaagggacgctcgtaagaacttccatttttttatacaaagcaagcctttctgaatataagtttggatctgtctgcttttgcgcacttgcagctgtgtctggccaaaaactagaaaaactaagaagaacaacaagcaaacatagccatacacggcgtcgcaaataagacaattgtgctagctcctttctatggggttttgtatagttttcggccaattggccgaaatgatgacagagaatctttaccagttgcagcgtgtactaatgttggaataattccgtttcccttgttggttcgaggtagaattcatggtacgataatagaagagatcggttcatttgcagaagggtgggagtgacaatgccagaaaaagatgaaaaagagcagcatatgcgcaaaccggactggctaaaaatcaagctaaatacaaacgagtcttatacaggcttgaaaaaaatgatgcgtgagaaaaaactacataccgtatgtgaagaagcacgctgcccgaacatccatgaatgttgggcggttcgaaaaacggctacttttatgatccttggcgatatttgtacacgaggttgccgtttttgtgcagtcaagacaggcttgccaacggagcttgacttgcaagagccagagcgcgtggcggaatccgtggagaccatggggttaaaacatgtcgttattactgctgttgcccgtgatgatttaaaagacggcggcgccgcagtgtttgccgaaacggtacgagccgtacgccggaaaaacccattttgcacaattgaagttttgccttctgacatgcttggcaatgaatcaagcttgcaaacattaatggatgcgcgcccgaatataatgaatcataatatcgaaaccgtaagaaggctgacgccaaaagttagagcacgagcaaaatatgaccgcacactcgagtttttgcggagagccaaagaaatgcatcctgatattccgactaaatcgagcctaatggtaggcctaggggaaacaaaggaagaaattttagaaacaatggatgatttgcgggctaataatgttgacattttgacaattggccaatatttacaacctacaaagaaacatttaaaagtcattaagtattaccatccagacgaatttgccgagttaaaggaaatcgctatgcaaaaaggctttagccattgcgaggcgggaccgcttgtccgttcgtcataccatgcagacgaacaagtgaaccaagcgcaagtgaacatggaagcaagaaaagcacaaggggagcaacagcgcgtataaaccgatgcttaatagcagagacaagcaacagtgtggaacgattatgcaagatgcataatcgttctctactgattgccctgtgggtattgtttaaatgttttgatcgtatcttgtaaaacatgttgatagccattaccagatggcagtgaagcaaaacgctcaatatctcttatgcgagcacggtcgtttgccacgtatacctcgtaaaaacgcggcagtgaagccgatgccgcccgtttaacttgttcggccacttcttcttctgtcatttgctgtgctcgatcttcatacacaacgagcgcatatttgtcagtgacaagcgttgcggcttcttcaatttgctcaaggctaaggactaaccgggtgaccacatcggcaagcatccctctatcaactgttaaggcgccaacggtattgtttgcccgtcctacttcgttttcggtatagcgggaaaacccataaccaaaatctctgcctgtttccgccataagtgtatcattgtccaatgtttgcatgcgttgtccattattatcgagaccagcattgttgcctgtgcaagcgcacagcaataggaggcttgccacagcaggcacaaagcgattcttcataagaaccagctcctttcattcatagcatgcgcacttttaagaaaagctaactgtaacaaaatatggctaaaggcaagcatgtcttttgttcctatggtaaaataacagcagaccaatccgatttgaggtgcgtacgatggtgacgatttcaggcattgaatatgaagtcctcgaaaacgagcgcaatggttggaatgaagaggcgttcaaagcgcggtacagcgatgtgctgaacaaatatgattacatcgtcggcgattggggctacaaccaactgcggttgcgcggcttttttgatgacaaaaacaaaaaatcaacattcgataaaaaaataagcacgttacccgactatctttacgagtattgcaattttggttgcgcttattttgtcttgcgaaaagtaaggaaacaagctatgtaaacggagcgctactccgtttgaggttgtcgacaaagtcggcaaaatcactcagactaaatagaaaatgcttggcagccgaggcgaacaacgaaggatgcgagcgtttggctccattctgaaaataaaacggagcaaagctccgttttatttgtcgtgtggtggatggtgattcggatatttccggggtaagcctgcatgaaggtctttgtttacataattaaaagcactataagtgcgctggccttctttccattcggttgttttattcacgaccggttcctcttttccgactggtgccccgtaaggcccttcaggcaattcttccggaataatataaaggtgcattgcttcgacattcgtgaactcgtcatacgcttgtcgggctttcctttttgccatctgatcacctccatcctcagtctgcccgaaaagtggcaaacaatagctgggaaaaggagtaggtatccatgtattttgttgacaggcagcggatcgaacaaacgcttgattatatggaacatttattaaaaatgatgaaggaagaggcgtttggtacgagcgacaaggaccgccttgcattagaacgaactgcttctgtgctcattgaagcagtcattgacgtcggcaaccagatgattgatgccttcattatgcgtgatccaggaggatatgaagatattatcgacatcttgctcgatgaaaaagtcattacagacgaaacggcagcagggttaaaacagttgattcgccgccgtaaagcgcttgtctatcagtatgcaagcttagaagcgaacgacgtatggagctggctccaggaaagccagccaagtttggaagctttcccgcctgctgtccgccaatatttaaaaaatgaacttggcgtcattaccgcttttcttccagataaagacactcgttaacgcatagaggtggacaatgaagacctataaaagctacttatttgatttagatgggaccgtatatcatggcaatgagccaatcgtaagcgcaatccattttatcaataaattggccaacagccatattccttatggctttgttacgaacaattcaacgagaagccccaaacaagttgccaaaagattaaatggaatgggcatcttagccgagccttggcaaattatgacttctagcgtagcgacagcctcttatttacaagcaaaaatgccccattccgcgctttatattattggcgaagaagggctgtttgaagcattggcagcctttgcgcagacagaggacaagcctgatgccgtcgtcattgggctggatcgggcgattacccatgaaaaactgagcaaagcagcccgctttgttgctaatggagctgccttgattgcgacaaatccagacgcgatgattacaaccgagtcagggcttgttgtcggcaacggcgcccttgtagcagcggtggcgtatgcaacaaaaacagaaccaattgtcattggcaaaccaggagctgcgattgttgaagctgccatcaaacagttaaagcttgacccgcgtcacactgtttttgtcggcgacaattatgatacagacttgcttgctggcattcatgctggcatcgacacgatccatgtacaaacaggaatcacaaccgatttatctgcgtataaaattcaaccgacatatagcatcccttctttagacgactggccaatataaagggagctttgccggtcccttcgttattggaaagggtgctgtgtgcttcgtccgttttccggtaattgcctctcagctaagccagccacgatcaatgtggctggcttattccgtgttcgcttttctatgggcgagcctgcttgaggcggccgcagcaatcgcgccgacaatatcatcgagaaatgtatggcaagcgcctgtcgatttatcgtttaatttctttaatattcctggtttttgtttatcaatataaccataattcgtgagcccgatagagccgtaaacgttgacgattgacaatgcgataatttcatctacgccataaagcccttcatcacgtgctaaaatctcttgcaaaggtgattccaagcatttcttttcagttagcaaatctagttgaatccccgttaacactgcattttggacttcccgtttggaaagaacacgttcaacattttctaagcatagcgctagtgataagccaggatggtatttttcttgcaggaagtacacgagaacggcgatgtcatgcaaactgactccgcgatcttgcaaccattcttttgccttctctgccaccgcgtcttttcccattatgttcctcccttaaccttctttttatagtctacgtgcaagcacacattttatgcgatgggctcatagactaaagggattggagcaaggagggaactacattgctggaacggaatttgtatgaccagtataagctttactgtgacgagcgttttactgttgggccgtatgaaggtttcagagcaaataaccaagcctatatcattttgccaaaggatgaatgcatggccgaggaagtggagatgatggcgttttgcgacttcatgcgccaagcaggcgatgaatctgtccttgaacttgtaccaaatcgcttcaaccagtcttccgccttaattgatggcgttgaggcctacgtgttcaaagtccccgaatttaacgaatttcgcggcgtccggattcaatcggagtgggatttaggggagcagctttttacatggcataagcgcggtcaacaagggcgccaacattggaaaaaggctagttttccaccatggcaagagctatgggcgaccaggttggaacagcttgaagattggtaccaagcgctcgtgaaccaagggccccagacgacaaccgatgaagcatttctctgcacatatccttactttatgggaatgacagaaaatgcgattcaatttgctgttgatactcaattagatgttaaaaaggaactacatgatgaaccgacgatttgccatcgtcggtttggagagacaagttggctttatatgtctgaacggggccacattgtcaaaccgcctactgcctttttatatgaccacccagcacgcgatttagccgaatggatccgtgagaacaggccaatgggggaaactaggcagaactgggagcggatcgcttcattttttggggggtatgaagagtggcaagtgcttactccctatacgtggcaaatgatgtatgcccgcttgattttcccactgcattattttgaagtgattgaaaactattaccaagcacagcttccccatgaacaacgtgagtatggaaagcaattccaacagttgcttgatcgggaaacaagcaatgccgatttcctcggagaattggcagaagaggcaaaactaagccgttacccacaaatgccattgcttgattggttaaaaggccagactttatagagcgttgcctaaagtaatgcttgaattcgcaggcaattccttttataatgtccattataagaaaacacatgtattttatataaggacagtggggagtgttagtgtgggggaacgagcgattcaagttggccttttaggcttagggacggttggcactggcgtagtgtcgattgtggaacggcatcaaaatgaattggcgcaccaagccggaaggccagtcgcgataaaaaaagcactcgtcaaacaaatagataaagtgcgaggatctgaagtaaacggtgtggaattgacaacaaatccagaagatattcttgacgacccagatttggatgttgtcatcgaagtcatgggcggagtaaacgagacgaagcaactgcttgaaaaagccattcgccagaaaaagcatattgttacggccaacaaagacctcatggctgaatggggtgcttcgctgctcgcgcttgcggccgagcaaggggtggacgtttattatgaagcgagcgtagctggaggcatcccgattttgcggacgatcacggaagggttgtcggctgaccggattacaaaaatgatgggaattgtcaatggcacgaccaactatatattaacgaagatgagccaggaaaaccgctcctatgaagatgtactcaaggaagcgcaagagctggggtttgctgaagcggatccaactgctgacgtagaagggctggatgcagctaggaaaatggcgattttagcgacgctcggcttttcagcgcctgtccagcttagtgatgtcgccgtgaaaggaatcaccaatgtatcgggcaaagacttgcatttttgcgagcaactcgggcttacgatgaagttgatcggcgtcgccaaaagagatgaggggcggttggaagtatgtgttgaaccaacacttttgccatctgaccacccactagccagcgtacaaaatgaatacaatgctgtctttgtccacggggaagccgttggcgaaacgatgttttacgggcctggagctggctcattgccgactgcaactgcagtcgtaagcgacctcgtgtcggtcatgaaaaatatgcgccatcgcgtcaatggctacgcggccatgaagccattgtacgaagcagtgtttaaagaagagcaggaaaagcaatcacagttttttattcgcctgcatgtagaagaccgaactggtacgttttcaagcattacgtcgttatttgctagatacgacgtcagctttgaaaagcttttgcagcttccactggaagaggatcaaatggcggaaattgtcatcattacacatgtaaccaatcgtgctgtatataaggaattaatggaagagcttgagcagctagatgtggttaaaacgatagcaagctcgtaccgagttgagggaggaaaaggataatggctgcttgggcaggacttttaaaagaatacggctcgtatttgccgattacggaaaacacgccggcattgacgcttggcgagggcaatacgcctttaattaaactcgaacatttatcagaagagtggggcgtagagctttatgtgaagtatgaaggggcaaacccgactggctcgtttaaagacagaggaatggttgttgctgtcgcaaaagcaaaagaagaaggggcgcaggcacttatttgcgcctcaacaggcaatacgtctgcggcagcttccgcctacggggcccgcgcggggcttcgttcaattgtcgtcattccaaaaggcaaaacggcacttgggaaagtagcccaagcggcgatgtacggagcagaaatcattgaaattgaaggaaactttgaccgcgctcttgcgctcgtaagagaattatgtgaaacggagccaattgcccttgtcaactcggtcaacccatataggctccacggccaaaagacagcagcttttgaaatttgtgatgcgctaggggctgctccagatgtattggcgatccctgtcggaaatgccggaaacatctctgcttattggatgggctttaaagaatacgatgagttgcaccaaacgggccggccgcgtatgcatggatttgaagcggaaggggcggcagcgattgtgaagcaacatgtcattgagcacccagagacgattgccactgccatccgcatcggcaatccggcgagttggaaattggctgtacaagctgcgaatgaatcaaaaggcgaaatcgacttagtgacggacgaagaaattgtcgaggcgtaccgggaaatagcgaaaaaagaaggcatatttgctgaaccaggttcatgtgcatcattggctggcttaaaaaaacacattcaagcagggaaagtagcaaagggctccaaaattgtcgccgttctaactggcaatggcttgaaggacccgacaacagctatagatctttccaatgtgcaaacgacaacggttgaagattcaaaaacagcgttggccgattacttaatggccacaaagccggcggtcaagtaaatggctttttcgattactgttccagccagcacagccaatttagggccaggatttgattccattggccttgctttaaaccgttatttgcacttggaagttgaacaagcaagcaagtggtcgtttatttgttcttcgcctggcctggagaatataggtaccgataatttagtgacaaaagccgctacgtttgcgagcaaagagtggggcaaggttttgcccccgtgtcaagtggtcatgaagaacgatattcctctttcaaaaggattcggcagcagtgccgcggcaattgtcgctggcattgaattggctgcttcagtttgtggccagtttgcttcaaaagcggaaaaggcccgtcttgcttccttatgggagggacatccagataatgttgctgcttcaatttatggaggcttagtgattggcacacatagcgaagagtcgacggagatccttcatgttgaagcgccaaacatcgaccttgttgcccttatcccatcgaagacattggctacgaaaaaagcgcgtgcggttttgccagatatgctatcgtacaaggaagctgttcaggcaagttcagtcgccaatgtactggcagcggcacttgtcaagcaagattgggaacttgtaggcaaaatgatgttagcagaccgcttccaccagccttaccggcagcagttgattcctcacttgccagacgtttgcgcttatgcccaggcagatgaggacgcatacggtgcagcgcttagcggtgcagggcctattattctttgcttagtaaaagaagggaaaggcgaggcgtttgcaagccgccttcataagcaatttcctgcatgccgtgcagaagttatgcgcccagctgttcaaggatcagccgtgtcgattgcccaagcatagttttttacttaaggctagcaggagcgtttgacaaatgatatggacacgtaaaagaagccgaccttttgggtcggcttttgtgtgcaaaacagcagcatggaaacgatgctgctgttgatttttagcgattaaaagacttgttcaatctccgtaatgcctggtacttcttcaagaagagcacgttcaattccagctttcaacgtaatcgttgaacttgggcatgaaccgcatgcacctagaaggcgaacttttacgacgccatcttctacgtcaatcagctcaacgtcgccgccgtcacgaagcaaaaacggacgaagcttgtcaagtacttcttggacttgctccatcaactcagtgcttgtttccattcgaaccactcctttctgcttattctccattataataggcgcgttaaaaaaaatccatgcattgctaccatctttctcgatttttatcatacaggcgttgccagatttgccggtgctcatgtaagctgtaaggaaagaatgggggagaacaaatggctaaatcaatcatgtttaccatttatggcgctaaacaaaaatgtgcttcttgcgtgcatttgcctagtgcattagatacaaaggaatggcttgaagcggctttaacacggaaattcccacaggcgccgcttgagtttcattatgtcgatattgacgaaccgcagtcatcggacgaaaaacagcgcttagctgcagcgattttaaatgaagagtatttttatccgctcgtcgttttaaatggggaagtggttgcagaaggcaacccgaatttaaaaatgattgctgaaaaagtggaagcgattctcgcctaataaacaagcacactgtcgtcaaacagtgtgcttaacaagtcatcaaccggaatggtatttgtacatccacagcacgccgctttttagaatccgcggcactctgcctgtaaggggtctttcacccatcatgccaaagccatgttttttgccaagtgaaccgagtacaccttttaatttaatgcgtggcaacgtcttaggcaatgcctcgcctttccattgatgttttaaaatcgttacaatttgctctgcttgtgattcggcaagctgggcgcttggcgcatgaggcaggcttgcacagtcgccgacaacaaaaacatcaggatgatctggtataaagtgttggggagtcaagacaatccgaccagagcggtctttttcaacgtcaagagcgcggacaacatcaacaggctgaacgccagccgtccaaataactgcatcggttgcgatgcgctcgtcatggttgtaaatcgccccaggttcgactttcgtaatgttggagttgttgctgacatcgactccgtgttcgacaaaccagttttgcacatacgtgcttaattttttcggaaacattgacaaaatgtaatcgccgcggtcaaataggcgaatcgtcaaatcgggccgactttcccgcagttcactagcaagctcaacaccgcttaaaccaccgccaacaatggagacgactccctctggacgaacgttgttgagcgcttcatatgttcttcttgtggcgcccattgtttgaatgctgtacgtatactggtcagctccaggcacgccgtggaaattgtctgtgcaaccgagaccaatgacgagtttgtcaaacggaatcgactcgccattgtcaaggtcaatcgttgaatcgtgcaaatggatggccgtaacggtcgcgtatttgatgcgcaagcgctcatcttcgggaaaagagacgcgcaaatgatggtccgacgctgttccggcagcaagagcgtagtattcggtttttaaacaatgataagggagctgatcgacaaggatgatttcccagtcctttggcaagtcgttaggcaataaccgctgtaacaagcgcatgccaccatatcctgctcctaatacgacgagtttcttcatggaaaaaggtctccttctttttgaaatggtgccaaaacttgtctctacaagtgtcattattttttcaacaagaccgatgcaagttggttcatggcggaatgcatgcaacccataagcaacatggctgttaataatgtgggcgagtaagctgtggtcaatggcgccagcaacccactcttctttcgtttcttctagcagctgcttccaatgggtgagcaggctatcttcgtgctcagcagcatgtttccaaatgagcaccgttaatgtagggtgaatatcgtagtcttccaataagtagagcaggcttgcccgaatatttgttagcagtggctggctgccagcaccgatggattgactgtttgccagcaagagcagccgctcttctgcaagcgcatgcaaaatcgattcttttgtaggaaaatggttaaaaaatgtcccctttgctacacgggcatgattggtaatttcttgtaccgttgtagagtgaaaccctttttgatgaaaaagggccacggccgcatttaaaatggccaaacgggtctttttctttttctggaggacggccataatggtccaccaataacagtggcgggttcacccccaatttgtaaggatatgaaaaaagtgacctcggtcagttttgattataccgattgatgagagatccgacaaccgtttttgaacgttttgttacaaaatgaatgagtgcttcactgttctgggggtcttaaaaagggatgattgactttagtggacagacagagtagcataacggttgaggtgacgcacatgagaccgattatcgaattttgtttgagcaacttggcaagcggatcacatgatgcgatggaagagctagaaaaagacccgaatttggatattattgaatacggttgcctcaaccattgcggcacatgtgcgctcgaccatttcgctctcgttaacggcgagtatatagctggagataccccagaagagttggtttccaatatttataaatatttagaagaaaatcctatgttttaagtgctgctagataaggaagctgcacctactttgttgcagctcctttcgatgataaaggagcgataaaatggcctttttaccatttagccatacatggccttatgagcagcaaggcaaagacttttatattgaaacatgcccttattgccaaacggaacacgtgctgactcccctgaaagaaaaggatgtcgcacaggcaaaagagtcatttaaagttcgccttgtcatgccatgttgccataaagtgatgaccattgttgaagcggatgacgattatttttgggcagacgaaccgttaagaaagtgaggaagaaaatggagttcacaaaaatgcacggcctcggcaacagctatatttacatcaatctatttaaggaacatttacccgaagagcgcttagctgaaacagcagtttggctagctgatccgaaccgagggattggcagtgatgggatgatattgattggcccttccacttcatgcgcgataaaaatgcgtatttttaataatgatggatcggaagcgaaaaattgcgggaatgggttgcgttgcgtcgcaaaatatagctacgaacatgggttggttcacgaaaaggccttttcgattgagacgctgggcggacctgtttttgctactgtggaggtagacgaggaagggcgtgttggagcagtcgccatcaatatgggacagccgcgtttaacaaggcaggccattccaatgatcggcgaaggggataagcctgttgtcggcgaaaagctagaggcaaatggcgaaacagttcaagtgacagctgtttcgatgggaaatcctcatgcagtcatgtttgtagagcaaatcgaaaaagcgcctgttgagtcgcttggccctgtgatcgaaaaacattctgcattcccagattgggttaacgccgagtgggtagaagtagtcagtgaaacagaacttcattttcgtgtatgggaacgaggttcaggcattacgcaagcgtgcggcacaggggcgtgcgctgcagtcgtcgccagtgtgttaaatgggtatgcgaaacagggggtaccggtaacggtccacttgcttggcggcgatctgacaattgtatggcaagagaatggcgatgtgctcatgcgtgggccagcagagtatatttgcacagggaatgtctttctttaacggatgctttaaaaagcctgttccgcacgtttgcggacaggcttttaatctgttaatagcgttttatttcattgtagaaagtgtcgcgttcaattggtgttttgccagctgttttgatcatatgaatcagttcttttctcgtgatgcctgcagacgttaatgcgccaacagaatgggaaattcgttcttctattaatgtgccatggatgtcgctggagccaaaagtcaacgccatttgcgtcaattgaacgccaatgttaatccagtacgcttttatatgctggaaattgtcgagcataaggcggctgaccgcaatcgtacgcatatcatcgtatgcagacgtacggcggtttaagcctgcctttacattgcgcggctgcatcgctagagggatgaaaaccataaaaccatttgtacggtcttgcaagtcgcggacgcgttgcatatgaatcaagcgctcttctttcgtttcaactgagccgtaaagcatcgttgaatgagtgcgcaagccaaggttgtgagcggtttcgtgtgcttcgagccattggtctgttgatgctttatccgggctcataatagcacgatagcgctcggtcaaaatttctgcaccgcctccagttaaagtggccagccccgcatccatgagcgtttggattacttctttcatagaaatgccagcaaggcgtgagaaaaattcaatctctgcccctgtatacgctttaatcgtcacttgcgggtagtgctttttcaacgtttttacggtattcacataatactcaaaaccgacttcattgttgtgaccgccaacgatatgaaattcgcggatgttgtcgttccaacgatcttctacatattttaatagcgcttcttcatccattgtataagcgccttcttcgcctggtttgcgcttaaagccgcaaaatccgcagttggcttcacacacattcgttgggttgatataaaggttctcgatgaaataaacgttttgcccgttttttcgctcgttgacgatattagccaattgtgcaactccgagcaaatcaggcgtttcatataaaacaaggccatcttctatcgaaaggcgctcgccatgcaacactttctctttcacttcttgaagcttcgtgtctgcaagtagtacactcatcttcatttcctccttttggaacaattcacattcacatcgtgttcccttcaaatccgtacgaacctattatactactaccatttttagaatgaaaggagcgtgaaccaaactccagcgcaaaagaaaacattacaaactaataacaaatggaagattatcgttgcgtggcaaggggataatctgtaaaatgtaggcaatatgcaaaaaggtgaatggtgataatagtggggtggtcgtattgcgtttaacatatgaggcttgtctagaaaggctagagagcctaagggctaaaatgctcatcgcagcaaagcagtacggcatgtcacatcctattgtgttaacatatagcaaagaaattgacttaattcataattacttgttagaaatggaatcgaagcgttcgtttccgaaaacttgagtcttcttacaaaaccctctatactgtaagaataaagaagggaggcatgtggaatgattactcttacggattcggctgcaagccaaatcgaagcaatgaaaaaagaggaaggcgatgcgtccctcatgcttcggattggcgtaaaagggggcggctgttcgggcctttcctacgcaatgggtttcgacaatgagcaagacgaagaagatacgaaaatccatgtcaatggcatcgacgtcttgatcgacaaagaaagcgagccaatcgtaaaaggattggtgatcgactataaacaaaacatgatgggcggcggctttacactcgataatccaaatgcgattgccaactgcggctgcggcgcatctttccgtacagctgctaatgcaggaacgccggaagattgttaaaaaaacgttgtcagcaaagacgagcgtttgtctggggcttcctttaaactgaaatacgtttgggaagattgaatagaacgatatgtacagtctaaacgggcggcagaatctctctgccgcccgctttttaagtttcaatataacgattaaaccgtttttctaagtagcgttgcaacagagacaacagtgaacaaataccccaataaatcaaggcagcaacgattagaacggtaaaataattaaattccctgccgccgacgatccgagcttggtacatgagctcaggcaaagcaatcgtggacgcgattgacgtcattttaaccaggcttaaaaaaatattgctaagcggcggcaatgcaatacggaccgcctgtggcaaaataatatgctgcatggcttttgtttttgacaaccctagggaagcggctgcttcatgttgtccacggtcaacggcagccaaggcggagcggttcacttcagcgacgtacgcagacgtattcaggctgaagcctacaatagctgcagctactgcgcttagctgaaacccaaattccggcaaagcggcatatagtaaaaacaataagagcaaaatcggcacaccacggttgaaagaaataaacagcatacacggtatgcgaacatatgcttgttttgacatacgtccaagcgctagtataaacccgaacacgagtgcaatggccatgctaattacagccacaaaaagcgtatattgcaagccttttaaaataaacggaaaggattcaatggcaaggtttagatcaaatgaacgcatctgccaacatcctattgaaattcaatatcatcaggcaatgttgtgacatcctggccgttaaaaaactgtttggacaactcactggcagtgccatcagcaaggagctgctcaagcgcttcgtcgactgcctctttcagacgggtctccccttttgccatcataaaggcttgttcactcgggtcgtaaaagagcgttgggtggacaacgacgtctatgtctggcatcgcctcaactgtaatagactgcaagtaaaagtcatttaaaatcacatctccttgccctgtttcaactgcacgtaagtaaacgtcattggtgacattgtcaaagaacaaaggctctgcaccatacgattccgctttttgcatatacgtcgttgttggcgctcctagggcaattttgccatctaggtcttctaatgtttcaatgccagataaatcatcggcacgtacaatcgcacttccgtaagaaaacttatatggcaacgagaagtcaaagttcttttgccgttcctcggtaatggctaaactgttggcagcaaggtgcacccgtccgctgtttagcgcttgtgtcatcgtttcgacgcctatttcttcaaatgtcacatcgacaccgaggagatcagctacttctttaacaagttcgacttcaaaccctgtcagttcattatcgtcatcatggtaggacgtcgggaataaagtccctgcagtggcaacgacgatcgttcccttttcttcgattgcatcccatgcttggttctcgtcgctcgcgttttcttcagccggctctcctccttggcaagcgctaagcaaggcagcagcagcaagcccaatgtaaggaaacagttgctttttcatctatcattcctcctgaaagtatacgtcctttgttagtatggagataaacggacgaacaatcaagaaacttgtttcttccattataaataagtccaacaaatataatcttgtcgcgacaaaaacgacgaaattgcatttttcttttattgaaggagatgctaaaggcgattaagatgaagctcgagagatagcactcatccatttttatgattatcattctaaaggaggaaatagaatggctgaaaaagggagcatccgttctcgagtacaaaaatttggcagcaatttaagcagcatgatcatgccaaatatcggcgcttttatcgcatggggcttgcttacagcaattgccgtgccgtctggcattgagttgttcgaaagttttgttagcccgatgatcacctatttgttgccgctgttaatcgcttttgccggcggacgtctcgtccatgattttaggggcggtgttgttggcgccaccgcagcgatgggtgtcatcgttgcagcggatatgccaatgtttatcggggcaatgattatggggcctcttggtggatatgtcattaaaaagtttgaccaagtaatggaagggaaaatcaagcaaggttttgaaatgcttgtcaataacttttctgccgggattcttggtgccgctttagctttatttggctctttagcgatcggaccgctggtcgctgcctttacacaagtattagaaacaggcgttgacgctatgattagctggggcgtcttgccgctcgtttcgatttttatcgaaccagctaaaattttgtttttaaataatgcgattaaccacggcgtcatcggcccaattgctgctgggcaagtcgctgagtacggcaagtcgatcctttacttgcttgaagctaaccctggcccagggatgggtattcttcttgcttatatgatttttgggaaaggtgcgtcacgtgcctcctcttatggagcaggaattatccacttctttggcggcatccacgaaatttacttcccgtacgtgctgatgaagccattgttgatcgtagcagctattcttggcggagcaggcggtattttcactttgtcgctgtttaatgctggattggtgagcgttccgtctcctggaagcattatttcgattttattgcttacagcgtcggatagttatgtgggcgtcattttaagcgttcttgtcgcaacggcgatttcgtttgttgtcgcatccatgatcctcaagtttgaccgcaaaggcgaggaagagaatttagaggaagcacaagggaaaatcaaagaaatgaaggggaaaacgaccgctgcggctgagccggaaaagacagctggggtcgactatggaaaggtatcatcgattatttttgcttgtgacgcaggaatgggatcaagtgcgatgggcgcttcaattatgaaagaccgcgttaaaaaagcagggcttgaaggcatctcggtggccaatacagccatcagcaacataccggatagcgcagacctgatcattacacacaaagatttaacggagcgggccaaacaaaaacaaccgaatgcgctccatgtatcggttgacaactttatgaacagccctcgctaccaagaaatcattgagaagctgcaagaagcacacgcacaagaggaacaacagcctacagacaagccaattgaaaaaattgtgtttgcttgcgatgcaggtatgggttctagcgcaatgggcgcttcacttttaaaagacaagtttaaaaaagcgggcattacgggtatccatgtatcgaatacagccgttagcaacattccagcagacgcggatcttgtcatcacccataaagacttgacagaacgagcgaaacaaaaacagcctgatgctgaacatctatccgtagagaacttcttaagcagtccccgctatgacgagcttgtggagcgtctaaaataaaacgacatcccctttaaggggatgttgtctatttatttaatagggaagggggggatgagtgtgcatatgacggcaagagagcgcgtcttgctgcaggctttgcttgctaacgagcaaggattgacattgcaagagctagctgatgtggcctctgttagtgtacgcacgatacaacgagatttgccaagtttagcgaaagtggccgcgaatcatcagctctcattacacagaggccattttcttgtattagaaggggcgtctacgtataagctagcgttaaaggagaagctacaaacgatcaatgccggtgatttcacgagcgatgaacgtgtagggttactattggccctgcttctagatgccaatgaaccagttaagctgttcgctcttgctaaagagttgaacgtcacgcctgccactgttggcagtgacttgacaaaggcggccgaatggctggaacagtttggcattaaattgatccgtaaacggggctacggcattgctgtaaaaggcacggaaacgaatattcgccaagcgatgtcggccattttatcggaaaacctcacggaggaagcattttatgaagccgtctattcaggccaaatgcaaaatgaagtcgctagccgtcttttgcattttgttgacttagaaacaatccgccttgtccagtcgacgatacaacgtgtgaaagaaaaacattttgatgacatggctgaccaatcttttattgctcttgtcgtccatgccactttagcgattgaacgaattaagcaaggcgaacaaattagaatggacgcgggccagcttgaagcattgcataaggaagatagcctgccggttgcacaggagttagccgaagcgcttgcgcaaacgttccaaataacgattcctgaagcagaaattggctatttagtcatgcatttgcgtggcgcgagaattgggcatatacaaggcgagccgtttgagcagtccaatgcagaattggcaggcagattaaagcagtttattgccggaatggaacaggatttgtctgtctctttagctgaaccgtccttattccaagggttgctcgctcatctgaaacctgctctctaccgggtgaggcaaggaatgaagatccataacccgctgcttgaaaaagtcaaagccgattatgctgctctgtttgccgtaacagctaaacaagcaagtgaggcgttcgcaccccttaagctgcctgaagaagaaattggttttttaacgttgcatttcggggctgcccttgagcggcgcaaacgatccgtgtctttatcagcattggttgtatgttcaagcggaattggttcggccaaaatgttggcgagccgtattagacaagaatttcccgaaatttcctctattacaaacgcctctttgtttgatttggacaaatatgatcctgccaactttgatttgttcatttcaaccgtcaaggtggagacgaataacaggcaagcgctccgtgtcagcccgatgttaactgctgacgaggcaagtttaattaaagcaaatatcgatgagcttttaaatgagcaaacgatcacggcggcgccgactattcgcacaaacgtggaagaaaagcgctcatttgcagacattaaacggatggcatcctttatcgactcttttttacagtctgttcgtcttgttgctgtggatgaacttcttgcagggattcgtgtttattgcgacattcttgaagaagaaggggcgttatccgaggccaaacaagtgtatgatgcgctgcttgcgagggagcggctaggtgggattggcattcctggtacagggttggccttgttccatactcgtttaaacgaaattaagcggcctgtgtttgtctttttggatctaaaaacagaagcgcaagttgcttcaatggctgatggcaatgaacgcattaaacgagcgattcttatgcttgcccctgaagctttagcagaacaggagcttgcgtttatgagttttgttagcattttgctgattggatcagatgacgaaacggcacttttctatcaagggagagaacgcgaaattacacagtttcttgaacaaaagtgccgcgagtttatgatatcgtatataaatgaaggagtggaccaatcatgagcattttaaaagcagagaacattaaaattggtgcgagcgtgggctcgaaagaagaagcgatcaaacttgccggacaagtgctggctgaccaaggctatgtgaatgagcagtacattgacaaaatgtttgcccgtgaagaattgacgtctacttatatggggaacttgcttgctattccccatgggacagaggatgcccgagaggatgttacacagtctggcttatcgattttattgctagaccatgaaattgactggaatggcaaccctgtgcagcttgtcatcggcattgctggcaaaggagatgagcatttagagatcctttccaaaatagcgattgcgtgctcggaagaggacaatgtcagagcgcttctccaagtgaaaacagctgaagacgtacttgactttttttcaggagtaacagaatgatgaaggctgttcattttggcgcaggcaacattggccgtggttttattggcgcattactggtcgatgcaggttatgaagtaacgtttgttgatgtcaatgagaaaatcattgatgccctgaacgagcggaatgagtacaaagtaacggttgcgggcgaaagaaaagagactgagacggttacaaatgtgcgtggaattaacagcaaaacaaatgaaaaagaagcgattgacgcaattgccgaagcggatatcgttacaactgctgtaggaccgactgttttgccctatattgctaagacgattgcacaaggattaaaacaacggactgcaagtaagccagtcaacatgattgcctgtgaaaatgcaatccgggcgacttctcaattgaaaaaagacgttttgtcccatctttctgaagaagaaacgacagccttgttgaaggatgctggcttcgctgatgctgctgtcgatcggattgtgccgaatgtccaatcagatgatattcttcatgtcacagtagaacctttttttgagtgggtcgtcgaaaagcctgctctgaaaggagatgctgttcagctcggcaaagcagtgcttgttgaggatctagctccatacattgagcgcaagttattcacagttaacactgggcacgcggttgctgcttatgttggctatcgcaaaggaaagaaaacgattaaagaggctttggcggatgattatattaaacaccgtgtccgcggtgctcttaatgaaacgaaagcgatgcttgtagaggaataccagtttgatgccgaagcccatgaagattatatcgacaaaattcttctccgttttcaaaaccctcatcttgaagacttggttgaacgagttggccgcggccctatccgtaagctgggaccagcagatcgcctcgttaaacctgcgaagtatttagctgaaaaagggcttcatcctgagtctttggcagaaacgatttttgatgcccttcacttttatgcggaaggggatccagaaagcgaggagctgcgagcccttgtcgatgaaaaagggtatgtggacgcgttctgtgaaatttctaaattagaaaaagatcatccgcttgttgaaatcgtcgctaaagagtagatggctttggcgagggcctaacagaaaacgtaaaaatgaaaagaagccagtctgggcgtttccgctgaaactggcttcttgtatgttttaaaacaggcttgttgaatgtcccgggaatgcgcgagccgtcgggtcaatgtatactttcgcattgttgacagcggtaggcgcttcgccaaaaccggtagcaattaatttaattttgccgtcatacgtgctgacgtcgccagcggcataaacgccaggaatgtttgtctccattttggtgttaactggaatcgcatttttgcggatttcaagcccccactctttaattggtcctagcgtggacacgaagccaaagtttacgatcacatcatcaacagcaatcgtttctgtctgatctcctttcacttctgaaaaggttaccgcagtgacgccgttttcgtcgccatgaagttctgccgtttcatagggcgtcaaaattcgtacagacgattttttaagcaaatcgacgctgtgctcgtgggcgcggaaggcgtcacggcgatggacgagcgtcacttctttggcaattggctcaagcatgagcgcccagtcaacagctgaatcgccgccgccaataacgacaacacgtttgcctgtaaaagcacttaagtcgcgaataaaataatggatgtttttgtcttcgtagaagtcagctttttcgacttggagtttacgcggggcgaatgcgccagctccggctgtaatcaataccgcttttgtataatggatattggcatcagtagtcaacacaaacgtttcatcttcttgcttttcaagcgtttgcaccgcttcttctaaaacgatttctggctgaaactgttgcgcttgggcagtcagttgatcaaccaagtcctgcgcttttacttttggaaatccagcaacatcgtaaatgtatttatcaggataaagggccgaaagctgtccgccaagttgaggcatgctttcgatcacttttactttcattttgcgcattcctgcataaaaggcagcgaataatccagcaggaccgccaccgataatagttagatcaaacatgtctttctgttcttgcaaaacctccacccccaagtgaaaatgaaatcctttctcattatacatgcactttcaggcaaatacaaaggacaggtctgtttttccttgcacctatccgtttttgtcgatggaaagaaacatgatagaaatagtggttacttttttttataggggagttgaaatttgaacaaaaaacgaatatgattaaagtgttagagattgtggcgaattattgaaaatgggcattatctgaaagagaaagtgaaatgaatcacaaacaccaaaatatttaacgaaagcggaagtgatgagagtgaacaaggcaagaattgtaatcgctggggcaggatatggcggcatgaatacagcggttacgctgtcaaagaagttagggccaaatgatgcatccattacccttgtaaacaaacatgattaccactaccaaacaacttggctccacgaaccggctgcgggaacgcttgagcctgaccggacacgggtcaagatcgccgatgttttaaacacaagtcgggtcaattttgtgcaagatgaagtgttggaagtaaaaaccgacgaaaagaaagtcatgttaaaagagggcgagcttgaatatgactacttagtgctagcgctaggagcaacagctgagacgtttggcattcctggcgtacacgagcatgctttcacaaaatggacgcttaacggagcgcgccaagtcaaagaccatattgatgcccaatttgctaactataacaatgtagaggacaagcatgaagggttactcacatttgtggttgcaggtgcaggatttacaggaatcgagtttattggcgaactttcagagcgtgtgcctgagctttgcaaaacatatgatgtgcctcgtgaaaaagtaaggttgtttgtcgttgaagcagcaccaactgcgttgcctggcttcgatccagaactggttgaatacgctatgaacttgttagaaagccgcggcgttgagtttaaaatcaacacaccgattaaagaagtcactgcttctggtgtcattgtcggcgaaggggaagaaattaaagcggaaacggttgtttgggcgactggtgtacgcggaaaccctgttattgagaaatcaggatttgaagcaatgcgcggccgtgtcaaagtcaatcctgacttgcgtgctccaggccatgatgatgttttcattattggcgactgtgcacttatcattaatgaagaaattaacaggccatatccgccaactgcgcaaatcgcgatgcaaatggcgaaaacgtgcgcgaataacttaattgccttgaacaaggggagcacggaccttgaaaccttcaagtttgacaataaagggactgtcgcttctcttggcggaaagcaagcaattggcgttgttggctcccgcaaaatttacggcggcacagcaaactttatgaaaaaaatgattgataaccgggcactctttattcttggcggcccactcctaacgttgaaaaaaggcaaatttcctttttaataagcgaagcgggacgaattttgcttagccaaaattcgtcccttttctatgttcagaagctcagattgatgccgacttgttatagtgtttgcggctgacgttcgtatgatcgtttgctacggctcgtctgacaggctttcaatcgtttcgactttgtcgacaacaggaagcttttttagtacactaagttttgtaggagggcgcttacatgaatgaaatccatatactgcaactgatcgtatcgattttgctgttttttgttttgtttgcgggtatcggttttttgcttaatatggtgctgcggttaacatggattatggcgtttctttatccgattgtggtgttgctgattgttaatgaagaaccttatcgccaatatatcgctgctccaggacaagcatttgcggctttgtttgaaaaagtcgtgtctcttcatctagcagacttgattattttgactagcggctttttaggtgccgttgcttcggggattattatgaaactgctccgcaaagcgggctatcaaatgttttaagcaaacaggcgtgattttagcctgtttttttgtgcatattctctcttttgctggcaatgctgtagaaagaggagtgtgacgaatgcttaaatcaacccacttaagaaaatggatgtttcgcggggtaatggtcgttttgtttatggctgccttgctcacaactgttcatatctttacgaatttaaccgtttttcattttcattctctaccgaacgtcgaaaaacgcactgctgtccaagcaaagacaattccaggtgtaacagtacccgtttacaaaatggtggaagaggaattggataccagtctttatgaacggacaagagtaactgccacgggctatacggcaggagtcgagtcaactgggaaagcgcctggcgatcctgcttatggcattactttttctggattgccggtggagcgtaatacgtattccacgattgctgccgatcctgctgtgtttccgattggctctattttatttgtaccaggttacgggtatggggtagtggcagatacaggatcggctataaaggggaaacacattgatttatattatcctaccgtttcggatgtttataacgagtgggggaaacaagagcttgacgtgtacatgattaaaaaaggaagcggcgaattgacgcaaaaagagcttgatgatttaaatagcgatgcgtctatacatgtgtttcgtagtcgcacataatggcacggacaggctgttcaaaagcctgtccgtttgcgtttaacctatgaaccatgtatgcaatagcaacgcgaggataattcccagcaacgcgccgaaaaatacttcaattggctgatggccaagtaactcttttagtttttgttcgttttcttttttaggccacgttttaatttcttcaacaagcttgttgaaatcttgcacgagctggtttaacacagtggcatggtagcctgcgtggcgcctaacgcctgtagcatcaaacataacaataatgccgaggacagcagatacggcaaaaagggaagagtccaacccatgctctatcgctacggcagtagacaaggcggtaacagccgctgaatgagagctaggcatcccacctgtgcttgtgaacaatgaaaaatcaagtttttttgtagcaaagaaggcgagtggaatcttaatcgcttgcgcaataataattgccataaatgccgcccaaagcgggaaattatccaaaatttccatgttctcttcctttcgctgataagcctctttaattcgtatagtataacatacgttcatagcgatttccttgacgggatattgattttttgtaagggattttagtcgctatggtatactggcagtgaggagggaattgcatgttttatctaacagatcaatggacaacggcttcgtctgaagaagtgctcgttgtcggtatatggaagaaaaagccttttagcggtatagtgaaggcgctagacgaggcattggcaggacagctaggagagttaaaaaagcaaaccatattcccaaagcaaagcggcggtattcttaccattcctacacttagtttgattgcagctaaacgtatttatgcggtctacttaggggaagaggatggattcggggcagacgagttgcgggaatatctcggccatgtaggaaagcaactaaaaaaagaacgtgtagaaactgcaggcgtgttgctagatggctttgtgacagaggctgtttcgccggaagacgctgccttcggaattggagaaggccttgctcttggcagctacgataaacagacgtataaagaaaagagcaatgaaccgattagaagccttgcaaaagtgacgctttatagcaacagagaagggctcaccttttatgctgatcgaggatatacatatggaaaggggacaaatttggcgcgcaagctcgtgaacatgccaggcaacctcttaacgccaagcgacttggccaatgaatctgaggcgcttgctaaaaaatacggcttttcgttcaatgttcttgagcgagaggatatggaacgctttggaatgggggcgctattagctgtcgctaatggaagcgatcaaccgccaaaaatgatcattatccgatacgatggcaatcctgaaagcgacgatgtaacagggcttgtcggaaaaggaattacgtttgattctggtggctattcgttaaaacctcctgccagcatgcatgaaatgaaaaacgatatgggcggagcggcagcagtgcttggggcgatggcgattattggtgatatgaaaccgaaagtcaatgtcttggccgtcatcccatcaagtgaaaatttaattaatggctccgcaatgaagccgggtgatgtcatctgttcactaagcggcaaaacaatcgaaatgcgcaatgcagacgccgaagggcgtttggttttagcagatgggattacgtatgcgaaacagcttggcgccaaacggcttatcgatgtagcgacgttaacaggcgcttgtgtggtggctcttggccacgaaacgactggggcagtcgctaacgatgatgcgctcatggaggcggtgaaagcagcaggcgacaaagctggagagccaatttggcggtttccaagtggaaaagggtataaaaagctgttagaatcgagcgatatcgccgacttaaacaattcacctggacgcccaggtgcaagcataacagctgggttgtttatcggtgcctttgctgaaaaaacgccgtgggtccatctcgacattgctggaacgggttatttaaacaaagcaaccaacattggtccagcaggagccacaggtgtgatggcgcggacattagcccattatgtggagtcgttaagcgaagcataacttactttcgtttcccattttttgttcttgtacgcatggggaaataagattataatacggagtaaggattcgtgtgagcagattgtttctggacgaggaaggagaacaaaatgattgaaacggcctatgtcgaaataaagcgtacgcgcgaacttggcaccatggggcgaaaatgccgtgtttttcttaacgaccattttgtcggtgcattaaaacgaaaacaaaaaatgacgattgaagttccagcaggcacccatacgctttttgctacaaatgatgcatcctttacggaaccagtaaaattgtctgttcaagcaggcgacactatttcttaccaattaaaagggcgccgcaacaaatcattatcgtttacaaaaattattgctttttaatgaaacgctaaaggttatgcctttagcgttttttattaatatgggtttgaaaccacgtgctctgcacgtgtgaaaacgaaacttctagagaggtctagtgatgaaaaaatctccaatcgttataatagaacttggccgccaaaccaacttctatcaacgaaannnnnnnnnnnnnnnnnnnnnnnnnnnnnnnnnnnnnnnnnnnnnnnnnnnnnnnnnnnnnnnnnnnnnnnnnnnnnnnnnnnnnnnnnnnnnnnnnnnnccatttaaagataagtaaagtaggaaacggttggcggtcccttcagaggtccctttagggacttcgttggtaaagtgcccttatagggcgaaattaaaaccgccggttctaccggcggatacttacttttgcctatttatatgtttgctgatcaatgggaggcgttttaatctttggcagcacggcaatggttgacagaaaaaaacagccgtggtaacgtagtaaatgttttcgttgtttaatgatttaataagataaaggaatgggtatgtatgaatgctgttgtcgtggcggttggcttaatgctgcttttgagtttgctacgtgtgcatgtcgtgttggcttttgcgatttcggctattgtcggcgggcttgtcggcgggctaagttttaacacaactatcgaagtttttacggctggattaggaggcaatgcagaaattgtttttagttacgctctgttgggtggatttgcgattgcgctagctaaaacagggttaccagactttttgattagcaaactccagcaatggatggaacgaaaaggagagagcaggcagcagacgttgacaaaaatgttgctttttttaatgttgactattgttgcgtgtatgtcacaaaatcttataccgatccacattgcttttattcccattttaattccgccgattttgaccatcttaaatcagctacaagtagacaggcgtttaattgcttgtattcttacttttggcctcactgctccgtatatgcttctcccttatgggttcggccaactttttcatcggatcattgccgacaatatggcacaaagtgggcttgtcattgatatggcgatgatccctgaagcgatgctgttgccgacggcaagttctgtacttggtttggtgcttgccgtatttgtaagttatcgcaaaaacagagcgtatcataacgaaccacttgctgggtttgagcacgctgaagaacagcaaccttatacaaagtggacactgactgctgctggagcagcagtagtcgttacagttgctgtgcagtgggcatacaacgactcgatgataccagctgcgttgtctggcatttttgtattgttggccacaagagctgtgcaatttcgcatagcggacgatatgattaccgatgggatgaaaatgatggcttttatcggctttgtcatgctagccgcggctggttttgctgatgtaatcagggaaactggacacgtagaaacgctcgtggccgacgtcgttgctacgattggaggcaataaagcaattgcggtagcggccatgtttgctgttgggctagtcattactttaggcattggttcatcgttttcgaccatcccgatcattgccgttttatttgtgccccttggaatggagctaggcttatcgaccatggcgattatttcgctcattggtgcagcaggggcaattggggatgcaggagcgcctgcatctgattcaacgcttggccctacggcaggcttgaatgccgacggccaacacaaccatatttgggatacatgtgtcccgacttttcttcactttactgttccgctgtttattttcggttggatcgcagcaatgatcttataggaaagaatcggaacgaaaaaaacgcaagcgttcgcagggagcgcttgcgttttgttattttacagcgtcttttaattgtttgcctgctttaaatgcaggcgtttttgtagcagcaatatcgatttcttcgcctgtttgcgggttgcgtccttttcttgctgcccgctcgcggacctcaaagttgccgaagccaattagctggacactttcacctttgccaagtgactcagaaattaaatcaaacatgctgttaacggcagccgatgcatctttttttgaaagctgggtgcgttcagcaagggcattaatcaattctgttttattcatcataccactcctcaaatgactaattggtaagttctgctaccatcatacccacatagtgagtttctatacgttttaagcgcttttttttcgcaaatgatgcaatgtcgcgtttatttccgcgccgacaatgaggataatcccagtcaggaaaaaccaaaacatgagaatgatgacgcctgccaatgggccgtatgtgctttcgtaattggcgtaattgctgacatatagggaaaagaaaaaagaaattaactgccagccaattgtggcaaaaatagcgcctattagcccatcgcgaaaacgctgcttggcgttaggcgcaatccagtataacgccataagagcgacaatcatgatcgcaaatgccgcaatccaacggaaattatcgagcatagcaacaacctcggtcggaaggagcaaaaacgcctcaagaaggtttaaaatttgatttccgaatacgggaagcgcgagtgtgatgataataagcaacaccataccaacagtcaatccaattgcaatgctgcggagctttaaaaaatgcctcgtctcttcaatgttgtaagcacgattcactgaacgaataaaagcattgatgccgtttgaagcagaccagagcgtgcctaaaatcccaattgacagcaagcccgcttgtggttcgccaatcgtatttaggacaattcggctgaacgtgtcaccaatttcaccaggaaaataggcattaattaagttttgcacttcgtcattgttaatttcaaaaaaggatacaccggcgagcacaaaaatcatcagtggaaaaatcgataaaataaaataaaaagcaagcgtagccgctaaatcaggaatagggtcgctttttaattgggcaatcaatttctttgtaaataaacgagcaaaacgcaagtccatattctccctccagacatgaaacaacccattgatttatacccgctcttttaaaatcataaacaaacacttcgacaggacgactcattatcctatatactaaaaggaaatgcaaaaggagtgggtacgatgccttcagtagaaagttttgaacttgaccatacgattgtaaaggccccgtatgtccgccattgtgggaaacacaagattggcagtgacggcgaagtgaacaagtttgacattcggttttgccagcctaataaagaagcgctaaaacctggcgtgattcatacgttagaacatttgcttgctattaacattcgccgtttttcagaggaatatgaccattttgatgtcatcgatatttcgccaatggggtgccaaaccggctattacttaataatgagcggaaccccgtctgtcgaagaaatcatcgatgttcttgaaaagacaatgacgtattcgctgtcaattgaaaccgttcctgcggctacggaaaaagaatgtgggcaagcggcattgcatgatttggaaggaacgaaagaagtcatgcgcaaatggctatctgaagacaaaggttcattaaagcaagtattttaaatgagaaaaagctgcatatcaatgtgcggcttttttctatagatacaaggaaggcaggcgtttttccttcatttttcattagaccaatttagctgcttgtgtggtatcattaggaatacaaaaatgctgcaagaaagaacaaacgatggggggagagcgtccatgttagaccaaaaagcttatgaaattttacagattattgaagcgaatggacgtctggaatcaaacaaaattgcaaaaatggttgatttgactagcgaagaagttgatcaatatgtaaaagagctagaagataaaaatgtcatccttagctattcggcagttgttgactggacgaaattgcctgccaaagaaaccgttacagcgacaatcgatgtgaaagtcgctccaaaaaggggcgttggttttgatgaagttgccgagcgaatttaccgttttccagaagtgaaagcactgtatttaatgtctggcgcatacgacttgtctgtcgtgatcgaaggcaagacgatgcaagaaacagcccgttttgtgtcagaacgcctatcgacgattgattccgtcttatcaacgacgacccattttcaattaaaaacatataaacatgatggcgtaatttttaaagagccagagtctgacaaacgaatcgtggtgagcccataatggagaaagtagcgatgacttcctattcccgcttatcagaccgtgtttcagaaatcaagccttcaggcatccgccgctttttcgatttagcttcgcaaatggagaatgtgatttcattaggtgtcggtgaaccggattttgtgacgccatggaatattagagaagaaagcattttctctcttgagcgagggtatacggcatattcagcgaatgccggtttaattgagttgcgcgaggcgatttcgcattacatggaaacaagatttgccgtttcatacaatcctgatacagaaattttggtcacagtaggagctagcgaagcgattgaccttggcatgcgggcgattttaaatgaaggagacgaagtgattatcgttgagccgacttttgtttcttatgcgccccttgtcacaatggcaggtggcgttcctgtgccggttgggacgtcggctgaaacaaattttgaagtgcggcctgctgatattgaagcagctgttaccgataaaacaaaagcaatcatgatttgttacccaaataacccaaccggatcctcgattagcaaaaagtgtttagaggacattgccgccatcgtccgcaagcacaacctgtttgttttttctgacgaaatttatgccgaactagcctacgacaaagagcatgtttgctttgcgacccttcctggcatgaaagagcaaacaattgtcattaatgggttttccaaagcatttgcgatgacaggctggcgcgtcggttttgccctagcccctcctgatcttttaggagcgatgttgaaaatccaccaatacagccttatgtgtgcgccaacaatggcccaatacggagcgcttgaagcgttgcaacacggaatggatgatgtagaacggatgaagctgtcttatcaacaaagacgcaacttctttgtgaaaacagcgaaagaaattggtttgccgtgccatcatccagacggcgccctttatgcatttccatcgattgcccatacagggtttacgtcagaagaatttgcggaagccttattaaaggaagaacgtgtcgctgttgtgccaggttctgtgtttggtgagggcggagaagggcatattcgttgctcttatgcaacttcgctaacccacttagaagaagcgcttgagcggattggacgctttttaagaaggctcgaattgcgctaataaacagagcgaaacacttgaataaaccgaaaggatcgcatagatttagcgttgctttgcaaaataaggctatgcttgctatgtatgtttggagggagacaaattggaactggtaaggcaaaacaacccgttaatccactgtatgacaaacgacgtggtgatgaattttaccgccaatggcttgcttgctattggcgcttcgccagtaatggctttttccgctgcagaaacggaagacatggcctctgtggcagatgcgcttctccttaatataggcacaccctccaacgaaggggtcgactcgatggttttagcgggaaaagcggcaaacagagcaggcaaacctgttatttttgaccctgttggagtaggggctacgccgtttcgaaacgaaatatcaaagcggattttaaacgaagtcgacgttgccgtcgttcgcggaaatgctggggaaattgctgccctccttggacaggcaggtacggtaaaaggtgttgatggcaagatcaatgctgatgtgaaagagctatgcctgcaggccgctaaagcgcttcggaccgttgtcgtagtaacaggagaggtggacgctgtttcaaatggcgaacaactagtagccgttgcaaatggtcacgagtggctcacgaaagtcgtgggtacaggctgtttgctcggaggtgtgattgctgcttatgctgctgttcagcctaatagtcttgtcgacgctgcggttgaagcacttgccttttatggcgtttgcgcagaacaagcatatgagcaaactaagaaagaaggaatcggctctttccagcaaacatttttaaatgagctcggcaatatgacggacgaaaaagcggctgctttgaaacgagtagaacagatttgttaggaacgaagctagacttggatcgagccacatgcagcgaatgagactgtgtggcctgatcgcttatgtaaaggagcaaccaatgattaatcattttcaatcggccaattggcctgatgctattggcgccaatttgcttgccaaagggataaaagagccaaccgccattcaagctgcggtgattccggcagctttggctggtgggaatatagtggcccgttctcaaacgggaacggggaaaacacttgcttatctcatgccactgcttgctaaaattgatgtttccaagcaggcgacacaagcagtcattgtggctccgtcccaagaattggcgatgcaaattgtgcaagttttaaaagaaacaacggaccatacaacgattacaagcatgccgttcataggaggcgccaatataaaacggcaaatagagaaattaaaaaaaggcaagccccatatagtcgtagggacgcctgggcggctgcttgaactggttcgcttgaaaaaaatcaaattggcaatggtccacacatgtgtgattgatgaagtagacaggtttgtagaagatgagcagtgggctgaaacggaagaactgggaaaacggattggccgagatgcccaatatttgtttgtatcggcgacagtcccagataagctcgaagaaaaattagcgctattcgcgcctgcgattaaacgaattgaagcgaaaggttcccttgttcctgccagtgtcgagcacttatgcttgtgggtggaagcgaggaatcgtgttgatgtaacgagaaaactaattgctgctgagaacattgaaaaagggattgtgtttgtcaaccatttgcagaggctaaatgagacggtggaaaaactgcgcttccgcaaagtgaaggcggtggcactctcttctgaaagtggaaaacaagagcgggaaaaagcgattgcttcgttttctgcaaatgaagctcatattttggtggcgacagatgtcgctgcacgtggcctcgaccttgaaggggtgacgcatattatccagttagaagcgccgtccgatccagacagttatttgcatcgtgcaggccgtacaggaagaatgcagcgcagcggtaaagtcgtaacactttttgaacagcgagaacactataaaaaagaaaagtacgaaaagcaactcggcatcgacataaaagcggcttcccttgtacgggggcgcttggttttaaccgattagaaggaaaaattcgatcatcctttactaaaaggaaggtcctgtggtaaaatcaaaaggttaaaacatgtttaggagttgtgatttatggcgaattatgaggaaggcagcatcgttgaagggaaagttaccggtataaagccgttcggagcttttgtcgcaattgacgaaaaaaaacaagggcttgtacacatttctgaagtagcgcacggttatgtaaaagacatcgccgatgtattggcagtaggagatgaggtaaaagtaaaaattatgtctgtagacgaggagtctggaaagatttctttgtcaatccgcgcgacccaagaagcgcctgctcgcccgcaagggaaaccacgtgctggcaaagggaaacctcaaggcgctcaacaaaagcaacagggcttcaataccctcgaagacaagcttaaagagtggttaaaacagtccaatgaaattcaagctgatttgaacaagcgcgcgaaaaaataagaataaggtaaaagcagctagacggtctagctgcttttttcttatcgttgtggctcaacttcgtggtcacgcccaagttcttctttcggcttcattaagattgaaatagcatacaacccggataaaccgataagagcgtaaatgaggcgggaaataatcgatgcctggccgttaaagataaaagcgacaaggtcaaaacggaaaaaaccgattagaccccagttgatcgcgccgataatcgcaaggaccagcgcagttctttgaataccgctcatctttttcacctcccgttctgtgcacacatctgtgatgtggctacctttatggtgtggaatagccttccagaatatacgcaatgctagttggcaataatcggttggttgcaataagcaattgttttgcaacggcgtgcaagaaaagatacgataaaaaaggatgctttttaagcaaaggaggaaataagcaaatggatgcttttactttttacaatccgaccaaattaatttttggccaaggaaaaaccgaacatttggcagaagagcttgttgtttacgatcgcaatgtcttgcttgtttacggaggcggtagcatcaaaaagaacggcttgtatgaaaaagtcacgaaacaattagaattagcaggatgtacggtcaccgaattggcaggagtagagccaaacccacggctgacaactgtgcaaaaaggaattgatttgtgcaaagaaaagcaaattggctttattttagcagttggcggcggcagtgtgattgatgcgacaaaagccattgctgtaggtgcccgccatgatggcgacatttgggatattattactaagaaagaaacgcctatggatgcattgccgtttggaacgattttgacgcttgcagcaactggatccgagatgaattctggttctgtgattaccaattgggaaacacatcaaaaaaagggttggggcagcatttttagttttcctaacttttctattctcgacccaataaatacgctttcggttccacaagaccaaaccgtttatggcattgtcgacatgatgagccatgttcttgaagcctattttcacccagcggagaatacgccgttgcaagaccggatttgcgaatccattttgcatacagtcattgaagcagccccgccgttgttagatgatctcgaaaatgtggatttgcgggaaacgattctttatagcggaacgatggccttgaacggaatcacgcaaatgggtgcgcgaggcgattggggtacacataatcttgaacacgcggtttcggctgtttttgatattccacacgctggcgggcttgcgattttatttcctcattggctccgccacagcattgatgtcaatccagaacgaagtgcgatgctcgctacaaacgtgtttggcgttgatccaacaggcaaagacaaacaggatgtcgcccttgaagggattgacaagttagctgctttttggaaacaattaggggccccaagccgtttggctgattacggcattgatgaaagcaaacttgagcaaattgctgacattgcttgtgagaacgggatttatggcaattaccataaactcggaaagcctcaaacacttgaaattttaaaggcggcactttaaaggggaggccatattttttcattcttcaccaagctttttccgtgtataatgtacgggaaggagagtgaaaaaagtggccaagaaacgagtaggcattatttttggaggaaaatctgctgagcatgaagtttcactgcaatcagcaaaaaatattgttgaggcgattgataaagatcgttttgacgtgacattgattggcattgacaaacaaggccaatggcatataaatgaagcgtctaattttttacttaacgcagataatccagctttaattgagctaaataaatcgaatcaaggcgtagcccttattcctgggaaggaagacaggcaactggtgggcacggcaaaccagtcggttcttgaccagcttgatgtcgtgttcccaattgtacatggtacccttggagaagatggatcgttgcaagggatgtttcgtcttgccaatttgccatttgtcgggtcaaatgtgcttggctcggcagtgagcatggataaagacattgcgaagcggctgcttcaaggggccggcctccacgttgcaagtgggttgacatttacccgtgctgctaaggaaacgattgattttgagagcattgctgatcaattagggctgcccctatttataaagcctgccaaccaaggctcttctgttggtgtcaacaaagcaacaactgaagctgaatttacggctgctattgaagaagcattttcgtatgaccataaagtgcttattgaagcagccattaaagggcgcgaaatcgaatgtgccgttctcggcaatgactacccgaaagcaagcacttgcggggaaattttgccacaagatgggttttattcgtatgatgcgaagtatattgatgaagacggcgccaaattggcgatccctgcagatttgccggaagacgtcaatcgccgtatccaagacattgccattcaagcttacaaaacattgaattgtgaaggcttggctcgtgttgatgtgtttttaactgaaacaggcgaagtgatcattaatgaagtgaatacattgcctggctttacgaaaatcagcatgtacccgaaattatgggaagcgagcggtgtgtcttatcaagacttgattacaacgttaattgagcttgccattgagcgccatgaacgggacaaacagctgaaaagctcggtttttgaccgcaattgacttgtgtttttagcctccgttcggtacatttaaaaggtaccgaacttaagggaggctatttttttatggcacatattcaatttgactacagcaaagctctttcctttttcggagagcatgaagttgcctatatgagagaggcagtccgcgctgcacataaagcgcttcatgaaaagacgggccaaggaaatgactttttaggatggatcgacttgcctgttgattacgataaagaagaatttgcccgcattcaaaaagcggcagaaaaaatccgccatgattccgatgtgctccttgttgtcggcatcggtggttcgtacttaggggcacgcgctgcgattgaagcgttgaaccattctttttttaaccaactgccgaaagaaaagcgcaacgcaccgcaagtcatttttgtcggtcagaacattagctcaacgtatttaagcgatgtgcttgatcttcttgatggcaaggatgtatcggtcaatgtgatctctaaatcaggaacgacaacagagccggcgattgctttccgtgtgttccgcgactaccttgaaaagaaatacggaaaggaagaggcgcgcaaacgcatttacgcaacaactgacaaagagcgtggagctctgaaaacattggccaacgaagagggatacgaatctttcgtgattccagatgatgttggcggtcgcttttctgtattgacagctgtaggcctcttgccaatcgctgtaagcggcttagcgattgaagacatgatgaagggagcggctgatgcaagagaagctttttcaacaggtgaattaagcgaaaatgcagcttatcaatatgcggccattcgcaacatcctttacaataaaggcaaaacaattgaattgttggtgaattatgaaccgcaccttcattatgtgtctgaatggtggaaacaattatttggcgaaagcgaagggaaagaccaaaaagggatttacccagcatccgtcgacttttcaactgatcttcattcaatgggccaatatgtacaagatggacgccgtaatttgtttgaaacggtacttcatgtcgaagcggtcgacaaacatattacgattgaagaagcagaaagcgatcttgatgggttaaactatttagcaggaaaaacaatggattttgtcaataaacaagcgtttaaaggaacaatgcttgctcatactgacgggaatgtgccaaacttagtcgtttccattcctaaattggatgaatactcatttggttatctcgtttactttttcgaaaaagcggtggctatgagcggttatttgctaggcgtgaatccatttgaccaaccaggcgttgaagcctataagaaaaacatgtttgctttgctcggaaagccaggcttcgaggaagagaaaaacaaacttgaaagtcgcttaacggacaactaaacattgtgcaaactggccaacgcagtccattgggctgcgttgttttttgtgtgttgacggtgtataagttcgaggctcctttcccacactaatggcgatggaaaaacgaagggagcgattggcttgatcgcacttgaatcaacaattgaaggcaaacaatataaagcaaaagaattgcaaagcgtattggaatcattaggctacacactcggtggcaactgggactacgaccatggctattacgattacaaaatctcgtcggacaatggttatacgtttttgcgtattcctgttcaagcagtggaaggggagctaggctcaaaagacgctgtcatccaagttggaacgttgtacttgctaaaccatgtttatcaacaagacaacgatgaagagtcgttaagcggcgttgtgccggcggtggccgaggggcttgtaaaccagtttcaagcgcctgttgacaaggacggggaagtctccgacaagtaccgctcgttagcggaaaacttagtagcagagcttgagcaaacgcttgtttgatcatcattgcgacatgggggaaaagttgctaaagtaatagcgggagggggagtgaaaatgggtgaagcgctcatcattgctttagctattttttgcggttggctaatactcgattttgtaaaggcgaaacgaatcacaatggaagccgccatccaatctgcagtcgtcggtttactcggcgggtttgtctggtttcttattggtttgtttttgcctacttgatagtgtttaagactgaaccattttaagcgcaaggctgcgattttttgttatttttgtattgcaaacagcggtgagctatgttatattattgcagtaacgttattggacatacataaccgtgtggggccttagctcagctgggagagcgcaacgctggcagcgttgaggtcaggggttcgagccccctaggctccattaaaaattaggacgcacatgctctaaaaaggagcatgtgcgttttactattttacaaaggacacagagaaacgatggtcaaaaatgaacaagccaatcccgcagaacattcgcatggtttatgggcgggatcttttgcggcgtatacaagcgtgacgtgtttttgaaccgccagttcacatattcgaaccgcccgttcgtagcgaatggggtgctgcgccaattctgactcgtatttcgcggcgaatgttgcaaatcgctccggtcgacaagaattcgccccccatcttcaggaggagagggcgcttcaattcgtttgacatgtatggttatccggttctcttcgttcatctgctgtttactggggcggtcgagcaccgtaaaagctatcctccttttattaatgatgccttgcattgggtgttactttctcgccctgaaaagataaggagaaacaagccagttgagaacatgtcaactggcttgttttggatcatgtttagtttacgttggcgattgcttctgtaagtggcgggacaacttgttttttgcgggaaacaacgcctttaagaacagctgtatggtttgtcaacgttgtctggaaggcttgttcaaatgcagcggttttgtcgccgagaacgagggcgactgaatcattttcaaggatgtctgtaataataaagacgaataagtcaagcccattgtcattgattttggctgtaatcactttttcaagttcgctttggcgagcgagtacgtcatttatatccacggtattcacttgagcaatttccactgtggcagcgcccattgcaaatgcttttgcatccattgtcaacagctcaccagctgttttatcagaaatgtcagcgcctgctttaagcatgtttaatccgtattcttcggcattaacgccagcaatttccgctaattctttggctgcttgcttgtcctcttctgtgcatgttggcgacttgaataaaagggaatcagagataatcgcggaaagcatcaagcctgcaattggtttaggaatgtccaggccgtgttctttgtagagctttttgataatcgtcgccgtgcagccgacaggttcggcccgataataaacagggtcagctgtttcaaagttagcaatgcggtgatggtcgatcacttctacaacttggacgtcgtcaatgtcgctgacgctttgttggcgttcattgtgatcaacaagaatgactcggtctgtttcgtttgctgctttttcgatcaagcgtggcgtgcttacaccgaatgcttcaagtgcatacaatgtctccccattcggttcacctagtcgtacggcttctgtttcaacaccaagctgtccttttaagtcggcgtaagcgatagctgagcaaattgtatccgtgtcaggatttttgtggccaaaaataagtgttttaggcatctaataaaactccttttacatagtatgttcaacattactatagtatcatcttcgtccggagacttgaagcgtttgtcggtcgattcggtgaatcctcctttaaatcagcggtaagcgatttcacactttccattggaccggaaaaagcgtataatagaatatgtgtgtgcggactggacaggctgtagcgttttttcggaaattggtcacaacttcttgacaggacttcgacagtttgtttaagtagctgcgcaataagctgtctatgctaaaataatacaataggaataatagtggttatattacacagtttaatgagacaggaggaagagggggtttatgagaacggaaaaaatagataagagcatacacaatgcctctcttgctacgcctaaacaagctttttcgcaagtcctctcagaaacattaaaaacagggatcattaaatccaatctgcttgcgatggcggcgggattgagcctagctctttacgttacgggcattccgattggcgaaaagcttccagaaattctttttgctatttttggctcagcctttgtcattggggcagcaggtgcctttaacaacatttacgaccgtgacattgacgccattatggaccggacgaaaaaccggccgacggtaactggcaggatgcagcctgccaatgcgttagtgcttggcatatctttatcattgcttgggttgttgcttctcggggtcgcttcgccacgtgcagcattgtttggtttcctcggcctctttttatatgtggtgccttacacaatgtggtcgaaacggcgtacgatttataataccgagattggcagtgttggcggtgcagtcccaccgcttatcggctgggctgcgatttctggagacttggttcacccggcaattattggcttgtttgttgttacggtcctttggcaaatgcctcatttttatgcgattgcgattcgtcgctatgacgaatacaaggctgctaaagtgccaatgctgccggttgtcaaagggttcaagcggacgtttatccaaacgaatgtctatttggttgtcctagcggcatccagctttttctttgtttcgttaagttggttcatcaccattgtagctcttgtgttgtcattgatttggctgacgttgagcatagctggctataaacgaatggagcctaaaaaatgggcgacccttatgtttgttttttcacttaactatcttacgattctttttacggtgatcatcggtttttcactgctttctcccttgttttaacaaagtggtgtcttgcctaggcaaggcgcctttttttagggtttagcttttggttagaaaggggatgtttcaatggagaacaattggctgctaattgccgttccaacgctcatggcagttgctatggggagcgcagcgctcgtgatccgcatgaaagcatcgaaacgccctacttcggcgaagcggattatggtgccgccgctagcgatgtcaactggcttcttgatgtttttatacgagccaacaaggccttcagccttccatgttggcgaagcgcttattgtcggtgcgcttttttcaatcgtcctcatttggacatcgaaatttgaagtgcgggatggtgctatttacttaaaacgttcgaaagcgtttgcttatcttttaatcggtttgcttgtattaagagtggcgtttcgaattgtcatggggcaggagttaaatcccgaggaactgtcaggtatgttctttttgcttgcctatggaatgctgttgccttggcgggtagccatgctcgtccgttatgtaaaactcaagcgcgatagcgacaaggtggcaacgtataagccgtgatcgtgtatggttagcgtttgaaaaacagacacgctatactgaaatagaaagacaatcgtaaaggaggatattcaatgaattctggcggatttattcaagagaacttttccatttttcaagcttcccacgaaggttcatgggccattctagcgatattgttcttagttgcttattttcttttccgtggaggtaaaagcaaggctggtacgattatacatatgattgcccggctattctttgtgattatgctcgtaacaggcgcaagcatgcttattgcctaccaatttgcttattttttctttatcaaaggaatcctggccgtattgcttatcggttttatggaagcagcgcttgggaaggcgaaacggaatgaaaacagcctaggcatgctgtttgctgttcttgtggtgcttgttgtcatcgtgctgatggggtatgggatcatccgtttttaaaacaaagcatgccacggcatgctttgttttagtttgagaataggttgctgtaatggaggagtgtgcggtaatgcatgccttcatggaaggcgacgatactgagaagttcgtctacggtttgaaacgattggcctcgcaaagtaaaaggcgccgttttttcggttcctcccgtctctgtggctaacttctgtgctgcttgttgttgtttagctgctgcttcttgaagcgtttcaatagagggaactttgtcggtccattgcaaagggctcgaacctttggcaaaagggtggtaatactcttttggaatcgttttttcaaaagttggcgcatgcccaagaacatggtctgcgatgaccaagatgtgcccgtaattccaatggacagagtttttgaaaccggcgggaataatatcgtgtttttctgcagggatggtctgcagggtctgttcatttgccatacgggcatatgaaaaggcggcgtaggtcatcgtatttgctcccttcggtaggatggttaaagtataacgaaaacagctgaagattgcattgattttaagtaggaaagggggagtaattatggaagcagacggtctatggctcagcttgctatttgtggcgagcatgattcccttcatcgagtatacgcttgccgtaccagttggtattcttttcgtgaatcaaccccctgtgctgaccgtattggtatcgattcttggcaatagcctcggagtggtgctgcttgtgttgcttagcgaaaaaattcgcgactggacactgaaaagacagaacagccagaaaagcgggcgacagtcaagcaaacagcaggagaagacaaagcattttttagaaaagtatgggatgccaggcgtagggattcttgcaccgattttgctaagtagtcatattggcgccgtaaccgccgttgcacttggcgtttcacgcagttatgcaattttgtggacgcttatcggtgttgtcctttgggccatcatttttggcattatttgtgtgtatgcaagccattggcttcttccattttttggccaatagagatatgaaaagcgcggcaatctaatcagatgccgcgtttcttgttaaccttgcatgtcttgcgtatcaagttgttcgttcggatctgaaaatacttctttgtcaaggctccctgtcacttttgaagtaaagatgccggacaccatgctgcctgaaacgtttaaagcagtacggcccatgtcaattagtggttcaatcgaaataaggaggccggcaagggcaattggaaaatcaagtgcggacaagacgagaatggcagcgaaagttgccccaccgccaacgcctgctacgccaaacgaactaatggcaatgaccacaattaacaacaaaataaacgttggttctagaggattttggcctaccgttggcgcaatcataatggccagcatggctggataaatcccagcacatccattttggccaattgataagccaaatgaacctgcaaaattggcaatgccctctggaacgcctaatttcttttgtgtttggatgttcattggcaatgcccctgcactcgtgcgtgacgtaaacgcaaaagcgagcaccggaaatgcctttttcacatacgtaatggggcttaggccagtcgcagctagaatgattaaatgaataacaaacatgacaatcagtgcggcataagaagcaagcacaaacgtcccaagtgtcgaaattgcctgtaggtcacttgttgcaactgttcttgtcataatcgccaaaacaccataaggagtcaaccgtaaaattaatgtaacgacgcgcataatgatcgcgtaaagggcatcgacaatgcctttaaacgtgtcggctgcttccggctgtttgcggcgtacacctaaataggctacgccgagaaaggcagaaaagatcacaacaccaattgccgaagtcggtcgttcgccagttaggtcaagaaatggattagcagggattagctcgacaatttgctgcggcaatgtcgctgcttccatgccagcgtaactttcttcaagggcatcgccgcggctaagttctgcttcgcctgcaggaatgtcaatcgcttcaagttgaaagacggatgaagcagtgatcccaatagtagcggcaatggctgtcgtagcaatcaatgtgccaagaatcaaagcgctaattttccctagattctttgttaacgtcatacgtgtaaatgcagacagaatcgaaatgaaaattaacggcatgacaatcatttgcaaaaagcggacataaccggtccctaaaatattgacccaatccattgattgttgaataacagatgaatcaggggcgaagaaaaactggagcaacaggccatataccacaccggctcctagcgccaacaaaacgcggatcgagaaagagacgtgctttttttgcatgtaaaacaacagtccagctacagcgaggacgatcgcaataatcaataaagttaagaacaagtccatatgctcaaactcctttggttaaaatatacaacgttctttatagtattctgtataatcatatgagtcaagtgggaattatatgtgaagtgagtgtatcatagattttgccatctggaaaaggaaaacgctcgcggataaaagaaggcttttgcctctgattggcgtttttctactaagaaaaatgggaacgttaaaaagcagtacatggttgttgtatttcatgttaaatggtggtgcttgaaatgaaaatgaatacaaatgcgcttgtgataagcatcgtttgcatagcctgttttttaatcgtagcttttagtttaaacaccgtttttttagagaaagtcgaccagttggcgttaacatgggctgagtcgattcgtgctgaaccggttacggctcttatgcatggctttgcctttttaggggcgaccaaaacggtttttgttttgacaggagcagtgttgatcattttgcttgttgcccgtgcctcgaacaaagaattagcatttactgctgttacgatggcggcgacaggtcttgtgaatatgctcgtaaaagaatgggtagagcgagaacggccagcacagtatatgctagttgaattgacctcgtacagttttccaagcggccattcaatgggagcgatgtcgttttacacagtgcttacctttctgatttggaaacgaatgaacaaacgaaggcaccgtatagcgtttgtggtgtttgcaagcttcatgatactcattatggggttttctagactatatctgggtgttcattatttgagcgatgtcattggcggatatttcctaagtggcagccttgtgtttttcttgttttggctgttccaaccaagaaaattgaacggataaaaggacaatttctaattgagagcgagattctttctcatttagacttgatattttttgtaaaaatgataagataagtacgtaattgataatgagtatcattagctgtagggcaaaggaggcaagcagcatgttttattcatgttaacattatgaaaataaaatatttactccctttgcttttaattttatcgtttgcatctttatttattggcgtacaggatatatcgccacttgacttatttcgtttagacgatgaagatgtgcaaacacttgtcattagccgtatcccccgtctattgagtgtattgattgttggtgttagtttaagcgtttgcggtttaattatgcagcagcttacacaaaacaaatttgtttcgccgacaacagctggaactatggattgggctcggcttggcattcttgtcgccgtggttgtttttacacaagcgaccacgttgcaaaggatgtttattgcctttctttttgcgttgtttggaacgtttctttttatgaaaatactggagcgcatccgctttaaaaacgttgtgtttgtcccgcttgtcgggcttatgttaggcagtgtggtcaactcaatcacgacttttctagcttaccggtatgatttagtgcaaagcttatcttcttggatgcaagggagcttttcactcgttcttaaagggcgctatgaaattttatacataggcattccccttgttgtcattgcctttttattcgcaaatcgctttacggtagcaggaatggggaaggatttttcgacaaacttgggcttaaattataaccaaattatgaatatcggccttttcattgtcgcgatgatcacggctacgattgtcgtcacaattggctcaattccttttttagggctagtcattcctaacatcgtttcgattataagaggggacaacttaaaaaacagtttgcctcatacagcgctattaggcgccattttcttgctcgcttgtgatattttagggcgtgttctcatttatccatatgaaattccgattggactggtcgttggggttgtcgggagcgcgatctttttgtacttgctcttaaggagacgatctcatgcagcctaaatggatctatttattactcggcgctatgttagcagcattggttggtactttcttgtttattgacatcgcccctggagcgtgggactatgcgttgccacgacgaggaagaagcgttgtggcgattgttattgtcggcggggcaattgctagctctaccttgtttttccaaacaatcacaaacaaccgaatcctgacgccaagcattatcggccttgattctttatacatgcttattcaaacgttgcttgtatttttgtttgggacgatcggtcttgtcttgataaaccaatatgtgaactttggtctatccattgtctttatggtgttgttcgctgtcttgttatatgccttgatgtttaaaaaagaagggcaaaatttatactttttgctgcttgtcggcattgtatttggcacattgttttcaagcctttcgacgtttctgcaagtcatgattgacccgaatgaatttttgacgatccagaatcggatgtttgctagttttagcaacatcaatgttgatttgctttggatttctatcgtgattctagcagcaactgttctttacatttggccgtatttgaaatacttggatgccatttctcttggacgcgaccaggcgattaacttaggcgttccttacgatagagcgattaaaaagtttttagtcgtcattgctttgcttgtttctgtttcaacagctcttgtcggcccggtgttgtttttaggcctacttgtcgcgaacgttgcaagagagcttatgccaacctataagcacacccatttagtgattacatcggttctagtttcaagcattgccttggttggcgggacgttgctcgttgagcgcgtgttcacttactcggctccgctgagcgtcatcattaactttgttggcggaatctatttcatttacttgctcttaagggggacgaaatcgacatgaccaccgcattaattgaccgaaatgccatcccattgcaaaagcttgatacacagcctataggcatagaagtgaaaaatgtcagcaaacaatacgacggaaaaagggtcgtcaacgatgtatcggttaacgttcgaaaaggaacaattacatcgtttattggccctaatggtgccggaaaaagtacgttgatctcgatgatcagccgcttgtcgaaaaaagaggaaggcactattttgattgaaggacgttcgcttgaatcgtatcacagcaaggaactggcaaaaaaagtgtcgattttaaaacaggcaaacaacatcaacatccgtttgaccattcgcgaacttgtcagctttggccgctttccgtattcacaaaaccggctcacgaaaaaggactggacgtatgtcgaagaggcgatcgattatatggcgcttcgcgacattcaagacaaatacttagaccagttgagcggcgggcagcggcaacgtgcttatattgcgatggtgcttgctcaaaataccgattatatcattttagatgaaccgttaaacaacttggatatgaagcactctgtctcgattatgaaaacgctgcgccgtcttgttgatgagctaggcaaaacgattatgattgtcgtccatgacattaattttgcctcttgttactccgactacattgtggcgatgaaagacggggcgattgtggaagaaggtcgctgccatgaaatgatcaactccgacacactccgcaatgtgtacgacatggaaatcgcagttgaagaagtgaattgcaaccgcatttgcgtctattttaactaaatagtagatgtcgttcattttgaaatggaggtgaaaaagcaaaatcttcaatatagagaaatattgacgatcgcattagggggcctatagagagagaataaaggaggcaattagacatgaaaaaaccatttatgtgggcattaaccgcttttgcaacagtaagtttagccgcttgcggtacaagttcagataaaaatgagcaaacaagtactggcgaaggaacaagcacagaagcgactgaagaaacgatcgaagtggaatcaatgaacggcgaggttgtcaaagtgccggttaatccagaagtagtcgtatcgtttgaccatggcattaccgattcgattcgcgccctaggcggagaagtatctggaatcccaaaagcgaacaacatccctgactacttgtctgagtttgaaagcgacgactatgaggatgtcggttcgttgtttgaaccaaacttcgagttgattcacagcatggagccagacgttattttcatttctggccgtgcgtctgacaactatgaagaattaagtgaaattgcgccaacggtttatatggccgttgacaacgaaaactttatggaatcgtttgaaaccaatatgcggacgttgggcgatatttttgaagcgcaagacgaagtagaagagcagcttgcaggcatccatgaaacaatcgacaacgtcaaagagcgggctgacaacacagataaaaatgccttgattctgtctgctgacgaagggtctgcgagcgcattcggcgcaggttcacgttttggcattatccatgatgtactaggtattaaaacagcagatgacattgaagcggaaaaccatggagaaacggtttcgtttgaatacattgccgatgtagaccctgattatatatttatgattgaccgaggcgcttctattggcaacgaagccacagcatcacaagtcattgacaacgagcttgtcgcccgaaccaaagcagcacaaaacgatgacatttatgtattagacggcgaagtttggtacttaagcggcagcggccttgaatcagttaagctgattgttgatgaaattgacagcatgtttgagacagaataggacaacctttcttaagggatcaaaacaaagtcgataaccttactcaaaaacttggttctagtgatggaaccaagttttttgattaatatgggtttgaaaccacgtgctctgcacgtgtgaaaacgaaacttctagagaggtctagtgatgaaaaaatctccaatcgttataatagaacttggccgccaaaccaacttctatcaacgaaannnnnnnnnnnnnnnnnnnnnnnnnnnnnnnnnnnnnnnnnnnnnnnnnnnnnnnnnnnnnnnnnnnnnnnnnnnnnnnnnnnnnnnnnnnnnnnnnnnnccatttaaagataagtaaagtaggaaacggttggcggtcccttcagaggtccctttagggacttcgttggtaaagtgcccttatagggcgaaattaaaaccgccggttctaccggcggatacttactggatgctctatggtatactaaaactttcctagcgtctcaggaactgatactagtagaaatttaatttgctttttaaaaggaacggttgatgtggaaagtacttcattccccttatggttgctcgctttagccgtattgttggcggctgtttgggcgctccgtatcgctcttagaagaaagaagcggacagacataagcaaaatcacaataaaagatattgaccgcatggaaggcggcgagtttgaagactatctggcagtcgtgtttgcagcgcttggctatgaaacgtaccaaacagcgaaagcgcgcgacttcggtgctgatttagttgttgtcgatgaagaagggcataaatgggtcatacaagcgaaacggtatagcgccaatcttggtttagcttgtgtgcaagaagtgtatggagcgcaagttttttataacgctgacaagtcattggtcatcacgtctgccgaaaaagtgacagaagcatgctggaggctggcagcagcgacaaacacctatttcttactacgtgaagacctcaaagaactggctagtttgatacgtaaaggcaaacttgaagaagcaagttgggtcgtaaaaacgccgcaagtgcctgaaccggtcaagggaaagccagcattaattgaagtcgaacagagccgaaagcgcatttcagccggcgattatttctacaaataattaaaaaacagcgaaggcagcttcgctgtttttttaggttagaaataagtgcttagctcatgaacaattcgtttgatacatgattggtcagcaagtaaatcgtattcgcgaatatcaaggcgcaaaaccggacaggcggaaaaggaagaaatccatgtttcataacggttgtacatttcttcccaataagaaaggggcgtttgtttttccatttcgcgccctcgtgcttgaatacggtctaaaatcgagtcaaaatcgccatgcaagtagattaatacatccgggcggggaaagtaaggcgtcatcaccattgcttcaaataagcttgtataagtttggtaatcggtttgcgtcatcgtgcctttatcggcatgcattttcgcgaatatgcctgtgtcttcatagatcgaacgatcttgaatatagccaccaccttcttctaccattcgcttctgctctttaaagcgctccgctaaaaagtaaatttgcaagtgaaagctccaccgttcgaaatcgcgataaaatttgtctaagtatgggttgttgtctactttttcaaaggatgttttaaaatttagctcgtcggcaagtgcgtgcgtcaaagtcgtttttccaactccgactgtgccagctacagttatgatcgcattattaggaatatgtaacattggtaagctccttactggttaacagatgtcaagcatgcatcaattttggcaaatacaaagtccaaatcatgcggattggcgacaaagtcaaggtcgtccgtgtcaatcgttaaaactgttgtgttttcctctttagcgagttctgccattgtcgcctcataatcgtctgaaagctttcgcaaataattggggtccatttctttttcaaaaggacgcccccttttggtaatacggttggtcaatgtggacaagcctgcttttaagtaaatgacgactgttggctttggcaatggttcatttaaaatttgaaaaatacgtcggtattggctccatttaaaagcagacagcgtttggcgggcaaaaattaagtttttgcaaatatggtaatccgacacgacgagtttgtggttaagaacagggccgatatcttctagttgtttgacgcggttgcacagaaagaacatttcggtttgaaaactccattcctccatattgtcataaaatttttcaagaaaagggttttcttcaacgatttcaagcaagcactctcgcccatagtgggtagcaatcgctttggccaatgttgtctttccgacgccaatcactccttctacacatataaatggggtcgtcaatccgtttcctcctcgttttgcatgtttacatgtgctagtgtaccacgttttgtggtcaagcagtgtgaaagtccaacgtcaaaaaatgtggtacacttaaggaagtaaatgagggaaatgagaagaggagggagactgctgttaagcagtatgcgatgaacgaatttgataaagtaatcgaacgcagaggaaccaattcaatgaaatgggatggaacaaaagcacggtttggcgaagatgatttgttgccaatgtgggtagcagatatggattttaaagcgccgaccgctgttattgatgctttaaaggctaaagtggaacatggcgtttatggctatgcggccccttccattgaggcagacgaagcgattgtgaattgggtcgactcccagtatggttggaaaatagaagccgactccatcgtccatgtaacaggcgttgtgccggcattaagcaatttaattaaaacctttacaaatgaaggcgacggaatcattattcaaccacctgtatattacccgttttatgatgtgattgaaaaaaacaaacggcaacttgtgaaaaatccgcttctatttgacggaaaccactataaaatggatttagctgggttagagcaggtgatcacagacaaaacaaaaatgcttctgttgtgccacccgcataatccaggcggacgcgtgtggagcaaagaagagttgcaagcgctggccgagatatgtgagcgtcacaacctttatgtcatttctgatgaaatccatgccgatttgctttttgaaggctatacacacacaccgtttgcaactgtgacagaaacaattgcaaaccgtacgtttacagcgcttgcgccaacgaaaacatttaatctcgctggcgttcaaggagcttacgtaattattgaagatccgaagcttcgcctggaattccgtagagagctggctgcgacatttatgaatggaagcaatatgttctctgacattgctactaaagcggcatacgagcacggaaagccttggttaaaggaattaatggcatacatccaagctaattatcagtatgctgccgactatttggccacttatatgccaaaaatcaagccgatccaaccacaaggaacgtacttattatggctaaattgccaagagcttggccttcaccctgatgaacggaaaaaatggttgctgcaagaagcgaaagttgcacttaaccatggtgccattttcggggaagagggccgtgatttcgagcgtttgaatttggcaactcctcgagaaacgcttacggaagggttggagcgcatccgccgcgcttatgaaaatagaggtttttgatgcaggaaagttgtattttaaaggcgaatagaatatataggtgtcttgtcatcctaatacgtccgattaaaggagtcgttgcctatatgagcaggcctttaaaatcattgtcggaaactttggagcaggaatttacacgctcattgaaccgcgaattaaccaaaccggaaaaagaactgttgaaatggattgaacagcggcagctgtatctcacttacgggcaaatgaagacatcataactgacaccagggctaggcaagacgtggggaggaaagtacttgaagacatttaaactgtatgcattgcaagtgattgacgggcaaggggggaaaatggaacaacaccccattccttttaaagacgggctcattatcaatatggaaaatgaagacaagacatggtttcttgacgccgttgtttccaatgaggatgcccatttttttgaaagagaacaggaagcagagcgccatatactcgttagtgtcgtcattacgagcaaaaacaaccaccccgcggtcatgattacttccattgaagccattacagaattggatcaaggaaaaagtgtcgtattaaaagggaaaattgtttcaggccgcgatgacgtgctggaggatgtgtttgaagacattcttgctgaaggaattgaacgggctgatgtggtggatgagtttaaacggcgagtcgaaaagttagaggcatattcagataaaacgattcaagaagtgtaccaagacttgaaaaaagataaaaattaccatttgctttaacagaggcaaaggcaacgggaggcgcgttcttccgttgtttttttcgtgggtgggcgtgttgtatagctttattgcttttgctccataataacaggaaaatgagtggaaaaggagcgccgtgattgtgggaaaaacaaagaaaacatgggggttgctatcccttgcctccgtgccgctagtcatgacgcttggaaactccatgttgattccagtgctgccgactattggaaaacaattgcaaattagttcttttatggttagtcttcttattactgtttattctgttgtggcaatcgtatttattcccattgcgggctatatttctgaccatgtagggcgaaagccagtcattgtcccaagtttaattattgccgggattggcggattgatggccgggttagccgcatggaaaatggacaatgcatattgggttattttaattggccggctgttgcaaggaatcggcgcggcgggggcatcgccaatcgtgatgccatttgtcggtgatttatttaaaaacaaccaagatgtcagtgaaggattaggcataattgaaactgctaatacatttggcaaagtgctgagcccaatttttggggccgtacttgcttctattatttggtatttgccgtttttttcatttcctattttttgttttgtttcgatttttcttgtcttgtttttagtagaaagcccgcctttagcaaaaaagccaacaaacttaacgcgttttttaaagtcgatgaaaaagatctttaaacgggaagggcgctggctttatgtggtgttttttgttggtgggatgtgcatgtatattttattcggcgtccttttttatttgtcatcgtttttagaagaggcgcaccatattgatggaattaggaaaggcgttattctagcatttccgttaatggcattgtgcttgacgtcgtatgggacagggcgaatcattggccaagaccaaatcaaaatgaaatggatgacagtagcagggttgtgcctgcttgctgtttcgacatttgtcgtttcgtttaataaggaattgtatgtaatgctgacagcactttttgcagcaggggtaggcattggtgcggcgctaccgagtctggatgcgtttgtgacagaagggattcccatggaacagcgagggtcggttacatcattctataacagcatgcgctttgttggtgtggcaattggcccgccattgtttgctctttttatgaaagggaaccatttctggacatttgcagggaatgcccttcttgtcgttttatcggttttgcttgtattttggggcgtacggccacataaaaaagtgtcgcagacttggcaataatagacgcattaaccgcaattggctatacttttaacaaaagaggaaatcgaaaaaggcggttgtgtatggaacaatttatcgatccccaagggcaaaaggtgaaactcgttctcgggaaggaagagcgatttacagaggaggcggggcacgtgcttgtacttccccgttttcaacaacaatgggtgcttactgaacaccgagaccgtggctatgaattcccaggcggaaaagtggagaatggcgagacgacgaaagacgcggcgatccgtgaagtttgggaagagacaggggcgcatattggcaccatcgtttatattggccaatatcaggtagaggggcagtctggaacgtctttttgcaaagatatttttgcaggcattgtgactgacatggaagaaaaagattgctataaggaaacaaaggggcctcttttgctaaaggagcttccggctgccttgaaagaggaccctcgttttagctttattatgaaagacgaagttgttcccaaagcgactgcctatgcaatcggacaagggattctttcgtagcgtgagaaagagtacaagggcatgcttaacggtgatgctcggttatccgtttttctaagcgctcgactgccatgtacataagtgtggccaaaatcgcgatgacgagcaagctcatgaacactaagttaaagttaaatacttggaatccatagatgattaagtagcctaacccttgcttgctaacaaggaattcaccgacaataacgccgacccacgataaccctacattcatttttagcgtggaaacaattaccggtatcgttgctggatacacgacgtggcggaattgttgccatttggatgcagaaaatgtttgcagcactttcaaatagttgccatctacttctttaaatgctgtgtaaacaaccattgttgtaatgatgacggaaacgagcatgcccatagcaatgacagaagtcatgtttggcccaagcccaacgatcaaaatcggaccgatcgctactttcggcattgagtttaatatgactaaaaatggatcaaggatttcggccaacctttttgaccaccaaagcaaagctgccaataacgtcccagccacggtgcctaagagaaagccaaggaccgtttcaaacatggttaccccggtatggagccaaagcgttccagcgacgatatgctcataaagcaaactaacgatgcgtgatggcatgctaaatagcagcgggtcgattaacgctaaacgtgaggctgtttcccaaccaatgacaagagcaaatacaatcgccagctgtgtgaggcgaatgaaccgtttttccttttgacgggtagtcatgtagcgttggtgcagatcatgtggtgtcaagtcgttccaactccttccaaatgagctgaaattggttgttaaattctggatggtttcgggcctcaaaaggagaaagttgtcttagtgcttgtggaaccgaaaaaatttgtgcgacacgcccgggcttttgggtgaacaaaacgatccggtcgctcattgcaatcgcttcgccaatatcatgcgttacaagaatggctgttttctgttccgacttcaatgtcttaaaaacaagctcctccagcttgagttttgtttgttggtccaatgcggaaaaaggttcatcaagcaatagtagcgacgggtcagtagccaacatgcggacaagggcgacacgttggcgcattcctcctgaaagcgcttgtggacgctcatgccgtttatcgctaaggccaaagcggttcagccaacgtagcgctttttttgccgacaactctgtatagctgcctcgtatccgttggccaatcgtaatgttgtcttcaatcgtcagccaaggaaacagataatcgtgttgcagcatatagccaatttggccattattggcggtatcaagagacagcgatccttcggtctgttccagcaatcctgcaatgatcgaaaggatcgttgttttgccgcaaccacttgggccaataaaagagacaaattccccttcttttacttcaagggaaacatcttttaatgcttgaaaagcacctgattcgttgacgtaagtgaaagaaagtcggtcaatgcgtaaggatgccatgatcgtgcctccttattccattccttgtttgctaatttcatcgttgacaagttcactaaagggaatcggttccggtaactctcctgcttcttccatgatttcaagcaactgtgcccatgcttcttctgttaaaacaggatcttctgcataagagccttgctctttatagcgttcgactgaacttgctaaaatggcaataggggtgtcttcaaaaaagggctcaatcgctttagccgtttcttcaggagactgtgattggatttgtttttgtccttcataaagggctgcgctaaatcggacgaacaagtcggcattttgatccagtacactttgtttagccataaaagaagtgtaggggacttgtttagcttcagtgccaaaagaggcaacaactgtaccgattccttcttcttcaaaaagcgaggcttgtggctcaaacaattggacataatcgcctgtgccagaagcgaaagaactggagatattggcgaactcgatattctgcaaaagcgttaagtctgcgtgagggtcgatatcatgctgtttgagcacatattcaccaaccatttgcggcatgccgcctttgcgttggcctaagaacgtacttcccttcaaatcttcccactgaaaatcgcctgtatcttctctaacaacaaggaatgttccatctgtttgcgtcaatgctgcaaagttaatcgccggatcagcagcttcctgggaagcgacataaatggatgtttctgaacccactagagcgatatcggccccgtcagataaaagggaagtcatcgttttatcgcctccccaagtcgttgtcagttcgatgtcaatcccgttatcggcaaaatagccttcggcgattgcgagataaaaaggggcgtagaagacagaccgagtcacttcggcaacacgcaccgtttctttgtccgtattttgaccacatgccgccaaaagaaggcaggcaatcgctgtgccaatagcaatatttcgttttttcacgagtctttcactcctttcaattgcctttgcctttgcttacactatgcacgcacaaaaaaaagggtgtttgcccatttcaataaaaggagtttttttatgctcatcacaaaagaacgtgttccgtcaccccatccgaatatttatttatacgagacagcttacaaaagtggcgcgttaacggtatacggtttattagcagaaccgaagggtcgagacaaacaaccagggttgttgtatttgcgcggaggcattaaatcagtcggcatggtcaggacacagcgtgtcatccagtgggctcacgagggatttgttgtgtttgctccttattacaggggcaatcgcggtggcgaaggcagagaggacttttgtggagatgaccgtgttgacgcatacagcggttttgatctgctaagcagccatcctcttgttgaaaaagaggcgggcgtccatgtagttggattttcaagaggaggcatcatggcgctttggacagggcttatgcggcctgaagcgactagtgttgtctgttggagtggcgtaaccgatatggtgctaacctataaggagcgcgttgatttgcgaagaatgatgaaacgcgtaattgggggaacgccgtggaaacgaccagaactatatgaaaaacgaacaccacttcgccatttaagcgattttcgtcccccgcttcttttcatacatggcgaaaaagatgagcatgtatcgattgtacatgctcaaaaagggcttcgcgcagccaagggtagccaaaacgccgaatcatggtttttcgctgatttttcccatcacttcccagccgacgagcaagaaaaagtattgagaaaggcagcgtcatggatgaaggcaaaacatcactcaggctgaggcaagcgtgttagcccggtacgaacacggaaacgacgacaatgggagtgtttgtctcggtcatatgctttaaaactgtcgttttatccgcaagaaaaccgttgctcatgaacccctgttctttcgcctcttccctcgactgcactcctcgtctgacaagcattttctatcagtatgatgcggtttatcgactttgtcgacaacatcaagcaggcagctaaaaagctgcctgcttgttaaaggttatgcaaggcgtggtccagcaagacggacgctgtcttttgctgccggaaaggcagaaaaattttcgtggaattgcttagcaagctgtaaggcggttgcctcgtaagctgcttcgtccttccaaacacgtcgaggggtcaacagctcatcagggactcctgggcagtgtgttgggacataaaggccaaaaatgggatcgcacactgtttcaatctcatccaattttccttgtaaagccgcttctaccatggcacgtgtataagcaagcttaatgcgtgtgccagttccatagctaccccctgtccagcctgtgtttacaagaaacacttggacgtcgtcattttccaatttgtccccaagcatagtagcgtactcttctggtttgcgtggcaaaaacggagcgccaaagcaagtagaaaatgtcgcctcaggttgcgtgatgcctcgttccgttcctgctagtttgcttgtgtaaccagatagaaaatggtacattgcttgttcttttgtcaacttgctaatgggcggcaatacgccaaatgcatcagcagtcaagaatattatcgcttttggaggcccggcaacactaggcagcaaagcatttggaatcgcttcaagcgggtaggcagcccgcgtattttccgtcaactcaccgcttttaaagtcaggtttgcccgtgtttggatcgacgacgacattttcaaggactgccccgaaagcaatagcgtcccaaatttgtggttcgctttcttttgaaaggccgatgcatttggcgtagcagcctccttcaatgttaaagatgcctttttctgaccagccgtgctcgtcatcgccgattaggcgcctatgttcggaagccgacagtgtcgttttgccggtacctgagaggccaaaaaagagtgccgtttctccttcatcggttgtgttggctgagcagtgcattggcagcacgcctgcttcagggagcaagtaattcatcacggaaaagatcgcttttttcatttcaccggcatattccgtaccgccaattaaaataatgcgttgctcaaatgagatgatgacaaacgcttctgagcgagtgccgtcgacggatggatcggctttaaacgtcggtgcgctaatgatcgtaaatggttccaaaccattgtttgaaggagcttgctcacgaataaatagctgtctagcaaacaagtgatgccaagcaaactcatttaaatacgtaatcggcagttggaaagaaggatcagcgccagcgaagccaacggatgcgtaacggacctctttttgttgcaaataatgtagcactttgtcttttagccgggtgaacacttccgatgaaatgggcttattcgttgcgccccaatggatggaatctctagacattggttcatcgacaataaacttgtcttgaggcgagcggcctgtgtaaaggcctgttttgacagcaagtgcgccagaatcggtcaatatgccttcatttcgttggagtgcatgctcgacgagtgtcgaagcgggcaattggtgcaacgttttagggcttgaaagcaattgttctagtaaagctgaacggtgaagcattttcatgtttaatggctcctttttgcaattttaagtggctttagtataacacattttatttaatagtccatactaaagtgaataaataggtcattcttttttagattaggcggcaaagcaggtaggctggtgaaaagcttttagaaatgccttttcttctctggtggaatatgttaaacttagtcgcgaaacgaacgaagcgccagcatcctataacaaaggaaacgttgggtgttatcgagatgcagttaacataacgcttttatccagagatggcggagggacaggcccgaagaagcccagcaaccaacacgtaacgtgtaaaggtgctaacctgcagaatgctcggcgttctggaagataagaggcgaaaggtaaatggacagcccttttcctcatggaaaagggcttttgttgtgcccaaggcttttgcgccaactacacgcctttgtaagacagaaacaaacgaggcgaataaccctctgtattgttcgttctatttgggctaagcaacaggccgtattaaaaggaggagctgcacaatgtctgtaaaaagaggtagacatttatttacatctgaatctgttacggaagggcatcccgataaaatctgtgatcaaatttccgacgctatattagatgaaatcttaaagaaagacccgaatgcacgagtcgcttgcgaaacatcggtcaccactggtttggtgctcgtggcaggcgaaattacgacaaatacgtatgtggatataccgagtgtcgtccgtcaaacgatcaagggaattggctatacacgggccaagtatgggtttgatgcggaaacatgcgctgtattgacatcaattgatgaacaatctgcggatattgcacaaggggtggacaaagcgctagaagctcgtgaaggtcaaatgaccgatgcagaaatcgaagcaattggcgctggtgaccaagggttgatgtttggatttgcaaccaatgaaacggaagaactgatgcctcttcctatctcgcttagccataaactttcccgtcgcctaacggaagtccgcaaaaatgggacacttggatatttgcgtcctgatgggaaaacgcaagtgacaattgaatacgatgaaaacgatacgcctgttcgtgtcgatacgattgttctttcaacacagcatgctcctgaagtgacacttgagcaaattcaagcagacttaaaagagcatgtgattgaagccgtcgtgccaagcgcgttaatcgatgaagaaacaaaatactttattaacccaactggccgttttgtcattggcgggcctcagggagatgcgggcttaacagggcgcaaaattattgttgatacgtatggcgggtatgctcgccatggcggcggtgctttttctggcaaggatgcaacgaaagtagaccgttctggcgcttatgccgcacgttatgtagccaaaaatattgttgcagcaggccttgctgataaatgcgaagtacagctcgcttatgcaattggcgttgcccagcctgtttcgatcgctgttaatacgtttgggactggcaaagcagcggaagatgtcctcgtcgagttggttcgcaagcattttgatctccgtccagctggcattattcgcatgctcgatttgcgccgcccgatttataagcaaaccgctgcttacggccatttcggtcgcaccgatgtcccactcccatgggaagccacagacaaggcagcagctttaaaagaagatgttttaaaattagaagcaaactaagaaagcggattaagcaataaacaataaaatgtaaaagcctgtcggttcattttgccgacaggctttttgtgtatcatttttgtacgctttattcattgttgatctttgtttctcgtcgctgtctgttgctgcaacgatttgtagtattggcctttttctacgtattcccggcgaatccgtgccatttcttttttgtctgtttcatttaaaggacggacgacttttgcaggccggccaaaagcaagtgttccaggagggatcaccttaccaggagggacaagactgccggcgccaataaatgcgccctcgccaatttcggcgccgtctagaatcgtggagcccatgccaatcagtgcttgtttacggatgatcgcgctgtggagcattgcttgatgacctattgtgacatcatcttcaatcataagaggcgaatgggggctttggtggagcattgattgatcttgaatattaacacgttctccaatgattgtcggcgctacgtcaccgcgaatgactgtatgaaaccatacgcttgattgagcaccaatcgtaacatcgcctgtaacgatcgctccctcggctacgtatacagatgggtcaatagttggaacaacgcccttgtatggaaggatcatgttgtcacatccttttcgtttaataaaaaaacagctatactaagtgtaacgcataatgtagcgaagcaacagcttgtataaggaggagtggctgtgcgctattttgacgttccagatgccagaggcgttgctgttattgttcatggagccggggagcatagcggtcggtaccgttggcttgtggaaaaatggaatcaacatgggtttgattgcctgctaggggatttgcccgggcaaggggagtcgcggggaaagcgcgggcatatcgactcatttcagaaatacataaaaacagtggatgtctggcttaagcatgcaaggacaaagcaattgccaattgtgctcgttgggcacagcatgggcggcctcatttctattcgtacattaatggaaaaagaccattcgtttgtggaagcgctcgtgctttcttcgccttgtttgcaactcgctatggacattcctgcgccgaaaaaggcggcagcaaaaatgcttaatcatgtagcgcctgcgtttagcatgaatgctggtttgtctcctgaacaaacgacgaggagcgagcaagtccgtgaagaatatgcgcgggacccgttgcgagtaacgaaagtatctgcccgttggtaccacgaattggagaaagcaatgcgccttacgaggcgctacccggagaaaatgccaaatatccccgtattattgcttgctgcaggagaagactatgtgatcgataaacaagcaggcatggcttggtttaatgatttgcagatcaaccataaaatgtacaaagaatgggacggcctttatcatgagctctttaacgaacctgaaaaagaagaagtgtttcgttttacgatcggctttgtgaatatgctgtttccgtaacaggcagtcatcgataaaaagatggcctcgggtgttacccaaggccatctttttgctgtctatttcattttgttatgcgtcttgcggctccttggcgtttgcccctttttgcaaatcacgttgtagcaaatcaagctttcctgtttcaggatcgatgactagaccgtgaacccgtacatcctttggcaaaagtgggtggttaataaccatatcgacactgtggttgacgctttccgttacattttcaaaaccagttaaaaacttgttcacatctacacctgcgtattggagtgcattgatttcatccatatcaatgccccgttcttcagccttttggagaacggaatttgcagaaaggcctgtcattccacagccgtaatggccaataacaaacacttcttctgcgcctaattcataaatggcaactagaatgctgcgcatgatgctgccaaatggatgggagatgacagcgccagcattacggataattttagcgtcgccattttttaaattcatcgcattatggagcaattcaacgagccgcgtatccatgcatgttaaaataacgattttcttttgcggaaatttgtctgctttaaagcgctcatattctttattagctacaaatgcttcattaaaagctagaatcgattcaagtttgctcatttggatcacttctccttctatcttttctttagaaaacccagtgttttctcttgctcggacgcttaaagatgaaatttcgctcgtttttcaatggctaccacaaaaggaggatcatttttttggttaataaattggtacgtcgctgcatgggccttttcttgaggaagcgattcgacataagccaacagttcgtttttttcctttttgccttgtgggtgtccatggtagacgacgagaacaatcaggccgccttgttttaaacggttaaatagttgctcaatcgctgcaattgtcgttttccctgttgttgtaacgcctttgtctccgccaggcaaatagcctaaattaaagatggcagcggcgatggttgagttgacaaacaacggcaaagtcgccaacttttcatggccgatttggaatagggatacttgcttgtccaaacctgccttttgaaggcgtgcttctgtagaggttagtgcggatgcttggatgtcacagccaatcacaacgcctgtttcaccaacaagtttagccaaaaccaatgtatcgtgtccatttccaattgtcgcatcaacgacggtgtcccctggctggacagcgctggtaagcaacgaatgggcaaatggcaggacgccaagaaggttcacggctcctccccccaaaaggcggggcatattaaaggctgtttaattaacgcaaacacgtcaggcaaataccaaaagcagctgactgggaacgggaacacggcaacgggatgatgagcgatttcggtgccgagctggttattcatcatttagacgactcccttttcatctaatagctatcgccgttatacaagacagaggccatgtgcgtctcttgtcttttggcgaatttttttcttagtttaccataattgcagcgaatgtgcttgttgcttatttgctaaatttctcctacactatcataggcacaatgtgagaaaggaaaaaaagaggaggcgcgtgttttgccgaaatcaatttggattttaatggtagcaacagccattaacattaccggcgcttcgtttttatggccactcaatgcaatcattatgacgcaactgcttgggcaaagtttaacagcttcgggagctgtgcttatgctaaatgcaggggcaggcgtacttggcagcttgattggcggcagattgtatgatcggattggcgcctatcctaccattttgctcggttgtgttctttctgcagcctctgctgttttgctcgctttctattatggagaatatggatggtacgctgtttttctagcggggatggggtttggttctggaatgatggccccttccatgtatgcacttgctggaagtttgtggccagaaggtgggagaaagtcagcaaatgcgatttatgtagcgcaaaatgtaggtgtatcactaggaacggctttaattggcgttgttacgctcgtacgtttgacagacgtttttgtcgccaatgcagccatgcatgtgttgctacttgtctacattgctgtgttttttcgccattggtcaggaagcaaaggaagaacggcgggagcaggaattcaacatgccaacaaagcgtctaaataccgtttgcaagcgctatggattgtgtcagtagctttcttcatttcttggcttggctatacgcagtggcaggcaaatgtgtctgtctacattcagtcactcggcattccattacatgcttacagtatattatggacgatgaacggattgttaattgtccttgcacagcccttgatccgatgggtgatccaaaaggggaggctaacgcttaaagggcaaatgggccttgggttgttcatttttgctttgtcctatcttgtattgacacaagcccaagtgttcagtggcttttttgtcgccatgctcattttgacaatcggcgaaatgtttgtctggcctgcagtgccaacaattgccaacgcccttgctccatctgggcgggaaggggcatatcaaggcattgtcaatagcgtagccactggcggacgcatgattggcccgttgctcggcggcatagtggtagataggttttcaatccaagtgctgtttgtcctcattagtattttactgctactggcgattccgctagtacgtctttatgaccgcccgctattaaaagagcatcagaatgatcacctgaacaacgctcaatagagcgttgttcaggtgatcgataagcatttttaactagtttaagtgccggtatgggtttagccaaccgcacgcgttttaaccgaaaaaaacataggcaaagtggtgtacttgaaaatttttgtgaaataatgcacaatataaatgtgaataatttcacaaaatccttaagaaggatgtgggcgcttatggtcagaacgccgagtaaagcgaaaagggatcgcgttgtcgtcattggaacggggcatgtaggcagcagctatgcattcgcactgatgaaccaaggggtggcaaaggagcttgtcattatagatatagatcaagaaaaagcaagtggcgacgtgatggatttaaaccatggccaggctttcgctccttccgtcacatcgatatggcacggcaattacgaagattgcaaagaggctgatgtcgtttgtattagtgctggggcaaatcagaagccaggggagacgcgtttagatctgcttgaaaaaaatgtgattatttttaaggaagtcgtggatgccgttatggcaagtggatttaacggtattttcctagtcgccacaaaccctgttgatctattaacacaagcgacgcaagtttttagcggcctgcctaaaaaacgagtcatcggcagcggaacaacgttagatacagcaaggctacggtttatgctaggcgagtacttccaaatttctgctaaacacgtccacgcttatgtagtaggcgaacatggcgatagcgcactgcctttatggagcacagcaacaattggaaatgtcccactttcccagtatttgctccgtaacagagcgtataaaaaagctgatttagatgacatttttaccaatgtccgcgatgccgcctatgaaataattcataaaaaaggcgccacttattatgggattgccatgagtttagtccgcatcacaaaagcactgttaaaaaatgaacatgctgtcatgactgtcagcacatttcttaatggcgagttcggagcgaaagaagtatgcattgctgtaccggcaatcgtaaaccgtaatggtgttcgtgaagtgcttgaactgaagttgaacgacattgagcggcaacagttcactgagagcgttcagatgctaaaaggcacttataagactattatgcaaacagggcactctttttagaacaaacggatccgtgttgaatcgaaaagctaaaataggtatatgtttgcttgactttggaaaagacttttcatacaatgagcatatcgtaaactagggaaatacaaggataaaggagtagtagcgtcacttcggaaagcaagagagctggcggacggtgcaagccagcctgagaagagatgtgaactcgccttttagttgtaagagtgaaccgcattgccagtagctcttaacgggacacaccgttatgtgtaagtgaacaggcgatgcctgttaatgtgggtggcaccgcgggaatgtatgcaaactctcgtcccttttgggagagagtttttttgttggaagcagcagaaggaggaaaaggaatgtcgttttcacatcaggagattgaaaaaaaatggcaagcattttgggaagaaaacaaaacgtttaaaacagacgaacaagcagaagggccacatttttatgcattagatatgtttccctacccatcaggggctggtcttcatgtcggccatccagagggatacacggcaacggatattttagcgcggatgaagcggatgcaaggctacaatgttcttcatcctatgggttgggatgcttttggcttaccagctgagcagtacgctttagatacaggcaaacacccggctacatttactaaacaaaacattgacacctttaaacggcaaattaaagaacttggtttttcttacgattgggatcgtgaaattagtacgactgatcctcactattacaaatggacacaatggatttttctgaaattatatgaaaaagggcttgcttatattgacgaagtagccgtgaactggtgcccggcactggggactgtgctagccaatgaggaaattgtcgacggtgtcagcgaacgaggaggccatccagttgaaaggcgcccaatgaaacaatgggtgttgcgcattacggcttatgctgagcgcttgctcgaagaccttgaagagctggaatggccggaaagcctaaaagatatgcagcggaactggatcggcaaatcggaaggcgctgaagtgacatttaagatcaatgaacattccgttaacgtgtttacgacgcggccagacacgttgtttggcgctacttatatggtgcttgcccctgagcataagctcgtgactgagatcactaccgatgagcaaaaggaagcggtagaagcataccaaaagcaagtcgcgctcaaaagtgacattgaacggacagatttggcaaaagaaaaaacaggcgcgtttactggcgcttatgccatcaatcctgtaaatggcgaaaagattccagtttggatagctgattatgtactaatcagttatggcactggagctgtcatggctgttcctgcccatgatgagcgtgatttcgaatttgctaatgcatttggcttgccaataaaagaagtggtcgcaggtggagatgtctcaaaagctgcttacacaggggacggagaacatgttaattctgattttctcaatgggttaaacaagcaagaagcggttgagaaaatgattgtctggctagagaaaaatggcgctgggcaaagaaaggtcacataccgcctgcgtgattggctctttagccgccagcgttattggggcgaaccgattccaattatccactgggaagatggctctatgtcagctctggatgagagcgaattgccgcttgtgttgcctgatctagaggaaatcaaaccttcgggtacaggcgaatcgccgcttgctaatgcgaaagattggctggaagttgttgatcctaaaacaggcatgcgtggtcgccgtgaaacgaacacgatgccccaatgggcaggtagctgctggtattatttgcgctatatcgacccgacaaacgacgaagcgttggctgatcctgaaaaactaaaaaattggctgcctgtcgatacgtatattggcggtgccgaacatgcagtgttgcatttgctatatgcacgtttttggcataagtttttgtatgatattggcgttgtgccgacaaaagaaccattccaaaaagtgtttaaccaaggcatgatccttggcgaaaataacgaaaagatgagcaagtcaaaaggcaatgttgtgaaccctgatgagattattgccagccacggggctgacacgctgcgcctgtatgaaatgtttatgggccctctagatgcatctgtagcttggtcaacaaacggccttgatggctcgcgccgttttcttgaacgggtttggcgcctgattgttaacgaagaaacaggcaagctgaacagcaacgtcaaagatgtagaaggcaatgaagcgtttgtgcgcacttaccaccaaacagtgaaaaaagtaaccgaagactttgccgagctgcgctttaatacagggatttcccaattaatggtgtttgtaaacgagggaaataagcaagaggtattgccaaaagcgctaatagagggctttgtgaagcttttgtcgccagttgctcctcatattgccgaagagctgtgggaaaagcttggccatacagatacgattacgtatgaagcgtggccgacatatgatgagtcgttgctcgttgaaaacgaagttgaggtcgtcgtgcaaatgaacggcaaagttaaaacaaagctcgttataaacaaaggagcctcaaaagaagaaatggaagcagcagcactcgctgatgaaaaagtgcaagcagctatcggcgagaaaacgattcgcaaagtcatcgctgttcctggaaagcttgtcaatattgttgttggttaatcattgtgactaaacggcgattaatgcgattcgtcccctatcctctttagcaagaagaggataggggtttttttgtggggaacaggcgaaatccgaacattagagcgtatgagtaggcgaatgtaaagaattcgtgttgacgaataatgtcgaaaggtgtaagatgacgagtgtaaaacaagggaggatgacaatctgtgatctttgaacagcaatacgaagaaattcttgccatcgctcgtgatatttttgcccatcctgaacttggctataaagaaacgcgcacgagtgaaactgtccgtacatttattgaacagaaaaacccgtcagctctcattgaaccttttagcacaacggggctgaaaacgcaattaacgacggacaagcataagacaatcgcgttcattgccgaattggatgcggtttatgcgcctagccaccatatggctgacaaaaagactggcgcagcccataactgtggccattatacacaagtagccattgcccttgcgttgtacaattattttgtacaaactggcgagcatcttcagtttgattttaatgtagcttttgtatttgttccagcagaagaataccttgatcttgcttatcgggaagaattgcttaataatggcacgattggccactatggaggcaagccagaagcaatgagactcggagtgtttgacaacatcgatgcaagtatttgcatccatgccatcggtggaacatttgaaaaacggacagttgaaatcaattgtgatttagcaggttttttgtataaatattatgactttattggcgaagcagcacatgcaggcttcgatccgtttgctgccaaaaatgcttacagcatgtcaacgttgtttaatgttgctttaggacttgtacgccagcagctaaaagacagtgaaaatgttcgaatgaacccgattgtctcagctagcgatatgtcgaccaatgtgattcccaacgcgattcgtatcggctccgacttgcgcacaaaaacgttagcctatatgggagaagtcgctaaaaaaatggacgccgctgcacgtggaagtgcccacgctcttcaaggcgacgtcgccattcatacgcaaatgggctacctcccctttgtacaagaccgttacttgtccacctttgtaaaacaggcgtttgcaaaaacagaggaagtggaagagttgctcgaaaacaacgcgattagtgcagcaggtgatattggcgatttgtcgtacatgatgccatgtattcaaattggccacagcggttttgcaggcaccatccacggcgatgattttgtcgatgttgatccacattttctgtttgcagtgttcccgcggtttctcactcaagtatttgctgagttaaacgaggcgatagactggagccgtctgtataaacggagttatgacgactatttagccgtaattgaaacagtgatgacgagcaacaccaatttataaacgaacaggggtgcactatgaaaggcacatttatttatttgcttttgttttctctaattgtgatcgccgtctctgaaatgattggctttcaaagcatcgcgattggtcccctatcgatcaatctcttaccgctattatttgcaattttaattacaatggtgtttgcgttttcaatttttcgcaaaggaatccttaaaaaagtctacagtaaaagcaatgtttctttttcaggcacgtatttaattatcattatgctgccacttatggctcgctacggggcagatgtagccccgcaaatccgggaaatcctcagtattggctggattttcattgttcaagaatttggcaatttaggcacagttttattaggcttgcctgctgcactattgctaggtttgcggcgtgaggcgattggcgccacgcttggaattggtcgcgaaggcgagctcgcctatatttctgaaaaatatacgttaaactctgatgaagggagaggggtcttgtcgctgtacattatcggtacgctatttggtgcgatctttttcagcattttgccgccagttttgttgcatttcggatttagcgttgagtcgctggccatttctgcgggcgttggttcaggcagtatgatgacagccgcctcttcctcccttgtagcaagccacccagacaaggagagcctcattcttgcttatgcttcagcaagccaactactcacaagctttattggcacgtttacgatggtgtttttagcggctcctttgcaacggtttatgtatcgcacgctgacacggaaggaggctaaatgatggaattaattataaaaaataaatatatgaagatgagcctcattcttttgctcagcatcatgttgattctttttacccatagcatgaagcttctatttcatcctggctcggtaggaagcatttccctgatgacagtagcaggccttggctcgttgtggtttttttcgttgattggcttgtttattggcgatttagctaaaaaactcccaatcggctttgttgcaaattttcctgttcttggctgggttagcatcacgtctctaactctatgcttgttgtttgatggatttgtccaagcgatccaagcggtggatttcttgtcaataacgacaccgattttaacatatgcaggcatttctgttgctgaccgcctagtcgagttgcggaagctgtcctggaaaattgcgattgtcgcgatcttcgtttttacaggcacatatttggcaagtgccgttctagccgaggtcggtttgcgtatcgcgtcataaatgaaaagaatttaaaaagccaaaaggaagccataacagcttccttttggttttttgttttttcttttttcgtaatgattttagcccagttcaattccaatatgattaaaatcagagtattactaaggaggcaaattctatgatcaaaaagaaactaattgtcgtactcgctatgttaacgttgtaaaacagccaacaagtactgaataaggaatgtgaataatcgataaaaataaaggaggattaaggctatgaagaaatgcttcacgctaataagtgctgttgctatgtttatcattttaactggatgtcatgtaaaggaagaagctgaacaaattcaaataatggattcaagtgatgaagagcttcctaatcatttaaatgaaattattgagttctctgacgttattgtaaaaggatcgtttacggaatttgtaaaaccaacaaatatgattcgttcagctaatgatcctacagtcgaatcagacgaactctatacggaagggcaaatatatacgtttcagattgaaaaaacgtataagggagaagtggagggttccattaaaacagcgatcacttacgcagatcaaatagccgccattgatgatcaaggagaaaggattgaagaagtaatggttgaaagccttgattatgaagagcttgatttaaacaagaattatatattgttcttagtagatagcgggtttattgaagaaggtttgtacacccctgcatctggcgcgtatatcattgaaattgaaaatgacgaatcgattcgttttctatcaaaacggatggaaggacaacttgctgaaaacctggaagtcgaggaaggggacggaagcgtacatggaatattaaagactgaatatcagaatgaaacagcgcttactattgtcgaagagttcgacatttttcctaatttccttgctgaagaaggaatagaaacgttaagtgatattgaagaaatgtcagggaaatagctgcctagcataaaacatcaggctcgcctttatgtgagcctgatgctacagcttacagctgacttatttgtttgcaaaaagggctgctgactgcccggctgtataaccagtcgagaaagcgcatgtaatgttaaaaccgcctgtatagccatggatgtcgagcacttccccacaaaaatacaagcctgttgtttttttggagtgcatcgtttttggctcaatttctttaatcgatacgccgccacctgtgacaaatgctttttcaatcgacaatgtgccattggcatgcaatggcaatgcgtctaatgctgatgctaattttcgaaaggcatcatgtggggtattggcgcacatttcactggaatcgatctctaatgactgatataagtacaaaagcaatcgctcaggggccatcccttttaatgctgtttttaacgttttttttggctctgcctttgcccgtttgacgagcgcttggaaaaggctctctgccgattgttcggggaacaacttaatcgtcattggaatcgtaggcgttttgaactttttcagtgccttgacaacaaactggctacagcgtaatgccgcgggaccggatatgccgaaatgggtaaaaatcatgtcgccttcatggcgaataatttttttgccatttggtcttagtaccgctagttcaattccgcgtaatgacaggccttgaagagactgatcgccgataaagggatcggcaagggtaatgggcacttctgtcgggtaaagctccgtaattgtgtggcctgcttttttggcccacgggtatccgtcgccagtagaacctgtgtggggcaccgatttgccgccagtagcgataattaacgcttttgtgccaaggcgctgcccgtcttctagtgccactccaactacctgcccgtcttctacaataatgtcagcgacccgggcatttgtacggatggtgacatcgagtttacggatttgcgcaagcaatgtgtcgaccacagtttgtgctttatcgttaacaggaaacatccgtcctctgtcttcttcttttaagcgaattcctaagccttcaaaaaaagcgataatcgattcattgtcaaatacagcgaatgggctatgcataaagcggccattccctggaatgttttcaatcaactgtttcctttccatccggttggtgacattgcagcgtcccccgcctgaaatcgcaagtttgcggccgagtttgttgcctttatcgagcaagaggacgtgtgccccttgttgcgcagcggcgacagaagccatcaggccagagggtccgccgccgactatgattacatcgtagttgtccattcatttcatcctcacttttttcactcttaccattgtacacaaaaaaatagaaaacaaaaggacaaaacaagcaggaggtaacggtttttaaagcgaaataaaagatggaccgatttggagattggagtggaagcaatggaaggaatcgcaacgaagaaattagaaacgttacaagcacaagtcatcgaatggcgcaggcatcttcatgcaaacccagagttgtcgtttgaggaagtagaaacgcctgcttttatcgtacaaaaattaaaggaaattggatttacagatatacgcgaacatgtaggcggtcgcggggtggtagcaaagctccacggcaaaaagccaggaccgacaatcgcttttcgtgctgattttgacgcattgccgattcatgaagaaaatgatgtttcttatgcatcgacgaagccgggcgttatgcacgcttgtgggcatgatggccacacagctgctttgttaggtgttgcggcaacgttgtttgaccaagtagatgagcttcgtgggacaatcgtgtttttgttccagcacgctgaggaaaaacctcctggcggcgcccgtgaaatgattgctgacggctgtttagaaggggtggacgctgtatttggcgcccatgtatcctcgcaaattccacttgggcaaataaatgcaagccccggagcagttatggctgcagttgatgcatttactgtgcatattcaagggaaaggcgggcacggcgctcatcctcattcgacaattgactcaattgtgattggtagccagcttgtcaatgatttgcaaaccattgttagccgccgcatcaaccctatggatacggccgttgtcacagttggcgtcttccaagcaggcacagcgttcaacgtaattgcagatacggcgcgaattgaaggaacagtccgcacctttcaagaagaaacgcgagctttcatagaagaggaaattcgggcgattgtttctgggaaggagcatggcgggcatgtcacttgcacgattgattatttaaatggctatccgccgcttgtaaatgccgaaaaagaaacagaagtcattcgcgacttggcaaaaggggtttttggggaagaaaatgtattaatgttgccagctgcacttggaggcgaggattttgcctattacttagaagaaaagcctgggtgctttttccacgttggtggccgaacggaggaagaacgcacgcaatttcctcatcaccatcctcgttttgattttgatgaacgggcgcttttccatattggcgaaatgtttttggccattgcgaatcagtatttgcgtagtcactaaagcagattactcagcctcttgaaaacaatcgttagctgaggaaagaagcggaatgagcctgttggctacagtctaagcaagcgcaaccgttatggttcgcttgctttagtgctcctttgggaaatggtttgcaaatcgctgatcggctgctcgttaaagggtaagcggatgtataaaattctgtttcaatcgaagttctcctgattaagtagcaaactagaagggaatgagctgagaaaaggagaggtgggtaaaatgaaacgttatacaattgatactagcaaacatagtgacatgattgacattactgcccaagttgaagcggctgtcaaagcaagcggtgtccattcaggcatagctattgtccaatcgttgcatacaacggctggcattactgtcaatgaaaatgctgatccagatgtcgtcgttgattttttgcgccgccttgatgaagtgttcccgtgggaacacccacaggaccgccacatggaaggcaatacggccgctcacttgaaaacatcgactgtagggccgtcacaaacggttataattgacgatggccgtcttgtgcttggcacatggcaaggcatttatttttgtgagttcgatggcccccgtgcaaaccggtcgtttgttgtccaagttatagggggcggattatgattcaggcagaagcagtatggaagggcaaggcggctcttggggaaggccctttatgggatgaaggagagcaagttctctactgggtagatattgatggttataagctccatcgctttaaccctaaaacaaatgacgatcaacagttttcgtttgctcaacatgtgtcagcggttgtcaaaaaggctggtggcggttttgtccttgcgatgggggatggcctatacttatatgaggaagaacggctgacaccttatttcctcttgccgcaagggggaaagcagctccgttttaatgacgcaaaatgcgatcctgctggaaggttatgggcaggaacgatggcctttgactgccattcgccgattggcgccctttattgccttgaccataacggccagataagcaaagcgatttctggactcgccatttcaaacggacttgcgtgggacgaagagaaaggactactctaccataatgaaactgcgagcgcgtccacgactgcttaccgtttcgatgaacagacaggggaaatgtctgaaccacgtataattgacattccatatcgctcttataatgggagtccagacggtatggcaattgatgaaaacgggcatttgtggattgctttgtatggagctagtaaggtaatttgtgtagaccctgataacgggaatgtacttgaggaagtcgttgtgccagcaacgaatgtaacttcttgtgcatttggtggcgaagactacaggacattgtatgtgacgacagcgaacaagcaaggtgagcatgaaggaggcagtctatttgctgccagagtagaaagcgcaggcttgccggcacacgcctacctctcacggaaatagcgtaatagaaaccagccgcccttggggtggctggtttttgtatgcacttgatatgaactttttcgatcgtttttataaagagaagcaattcttgttaatctatgctaaaatgcgaaagaggtcgcctcgtcttgaggcgtgtcgaaaaaacgtacgaatgaatgaaatgtgaaggatgtagaaacgggggaagtcatggctgcttcaaagctcatgcaaggaacgaaagtattgaccgtggcgacgctaacgtcaaaattgattggttttgtttatgttattccttttacggcacttgttggtttgcaagggaatgccctctaccaaaatggctatacaccgtattcgattttacttacattatctacgcttggcgtgcctgttgccatgtctaagtatgtttcaaaataccacgccctaggcgattatgaaacagcgcaccgcctgttcaagtcagggatctggtttatggccgttacaggccttcttgcatttttagtcatgtttttaggcgctcctgcccttgcgtcgcttagttatcaaccgagtgaaacagatcagtatacgtttgacaacgttgtctatgtgattcgcatggttagttttgcgctgcttattattccaataatggcgattgtccgcggctatttgcaagggtttcaacaaatggtgccgacatcggtttcgcaagtcgttgagcagattgtccgcgttgtctttatattagcagcttcgtttgctgtcatgtctatcggcagcggcgatttgccacgtgcagtcggttttgcgacgtttggcgcttttgtcggcggaattggcggaatggctacgttgctttatttttatttcaaacagcgccctacgattttggcacgtgtacaaagccaccctgccaaagaaagacaaacgcttccgagcatgtataaggaactgatttcgtatgcactgcctctttcttttgtcggcttggcgattccttttttccaggctgtcgatttgtattcgattgagggggcgctttctgggaccgcgtatgccagcgaagcgaaagcgtttgtcggcgctttaacaggagtggcccataaaattgtccttatcccaatggcgctagcaacggccttatcgattacgttggtgccgacgattacaaaagcatacgttaatcaagacaataagctcttgcaaagctatattacacaaacgtaccaagtgattttatttatcggtatcccggcggcaattggtatgtctgttctagcaaagccaacttattttgccctatttggcagtacgaacttggagctaggagcggaaacgctaggtttttacgcgccggcaaccgtgtttttttctatttatgccgtaactggttcgattttgcaaggaatggatcggcaaaggaatgccgttttatcccttgtcgtcgggctcctattaaaactagggcttacttatgtattcttaaaatggttcgggccatatggcgcgatttggacaacctatattggtttcgggataggtattgccttaaatgtttatttcatcggccgatttgccaagtttgactatacgtttatttatcgaagaacggtgctgatcgttatatttgccgccattatgggagttgcagtatgggtatttgccaatgggcttgcagctttatttccagagttgtcccgtgtgacaacgtttattgtcttacttgttagcatcggcgttggtttaattgtttacttctatttggccatccgttcccatttggctggaaaagtgcttggagagcggtttaaattgtaacatagctcgtttgtgcacaatcataaaaaagcagttgccaaggaaaagacgactgcttttttacagattaaatggacctgtttcaatttagtcttggctgaccaaagcggcggcaaaactagtttatctgcaaggagaatgacttgttccgcaactttcccataaactagatgattttcgacatttgtttataagaaaaccctctttttcatggggacaagctttgatataatgaagcaagtttattccgatttaatgggcggtttgactcatgccttcagcgtaagcttttgcgcgggccgctgccacgtttaaaaggcccataggaggactaaagtgaactattcctttcgcaaagacaatgattgggtattgattggagcaacggttgcactgacattgtttggcttattaatggtatacagcgctagttatgtggaaggttattttttggaaacgccgaatccatattactatgtaacgaggcaagcggtttggcttgtccttgccatcgcagtgtttttgtttgtgatgcattttcaataccgacattataaaaaattaacgcctgccattgtggttctagcgctctgtttgcttgtgcttgtattagtaatcggcggaggcagcgaagtcggtgcgacacggtggattcgcattggaccgatgaatttgcagccttcggagtttgtgaaaatcggaatggcgatttatcttgcccaagtgtattcgcaaaaacaagcctatattaatgactttgtcagggggattttgccgccgcttattattgtcggcgttgcgtttgccctcattatgcgccaacctgaccttgggacaggcacgtcgatattgatgacagccattcttatggtgttcgtatcaggggcaagatggaagcatttaattggccttgggttagtgggcgctacggtatttgctgcactggcgatttttgaaccgtatcgtcttgagcgccttacgtcgtttgtcaatccgtttgcaagcccggatgatagcggctttcagcttattaacggctatctggctatttcaaatggaggcgttgctggccttgggctagggcaaagcctgcaaaaaatgcggatgcttccagaaggacataccgattttattttagcggtcatttctgaagagttggggcttcttggccttgtgtttatatttggttgttatgcgatcatcttgtttcgtgggatttcgattggcgccaaatgcaaaaatccgtttggcagtttgctcgcctttgggattgtgtttcagcttgcgattcaaatcatctttaatgtcggagctgtttccggcatgcttccgattacaggcatcacattgcctcttgtatcatacggggggacatcgctgctcattactcttgtggcgatcgcgattttggcgaacatccatcaaaccaacatgagacaagcacgcaaacaagcttcagacgaatcgctatcagcatagatggaggctatcaatggaacgaaaacatacggggattgattatacgctgttgtttctgctgtttttgcttatgtgcgtcagcttagtagcaatttacagcggggcggggcagtatttttccgatgaccccacttatttcgtcgttagacaattaatatggtacggtattggtgcggtcgttattgtcgccgtgatgttggttgactttgacttatttcgaaacttctccattcctgtttatgcaatagggatggttttgcttttggccgtcgagttttttggagaagaacggaatggcgcccaacgctgggtttttggtattcagccatccgagtttatgaagatttttctcatattggcactcgctcatttattatacaagctgacaaaggataagcaaaagcggactttcaaagaagacatggtcgtgcttggaaaaatattgcttgtcagcttaccgccgtttttccttattctaaaacaacctgacctcggtacagcgcttgtaattgggtccgtaattgcaacgatgttgttaatgtcaggcatacggtggcggattttgttgtcacttgttgggattgcggttttaggtattgcctttctcgtgtacatgcatgaagctcattttgagttttttagcgaatatttgattgagcctcaccagcttgaccggatttatggctggctcgatccagacagtgacacgagtgggattggctatcaattaaaccaggcgatcctcgggattggttcaggccaattgtttggcgctggttttctggaaggcatgcagacgcaaagcgatgtgatccctgagattcatacggactttgtgtttacggtaattggcgaggaattcggctttttaggggcaatggttttgctcgttatttactttttgttgttttaccgcatgattatgatatcgctgacgtgcaacaacctctatggctcttacttagtagcgggcgttgttggcctgctcgtttttcaagtgtttcaaaacattgccatgacgattggccttatgccgattacgggacttgctttgccattcattagctatggcggaagcgcattgctaacgaatatgatggcgattggcatcgttctaaatgtccattatcgtacgaaaaattacatgtttacaagtgaagacacatttagctgaaaccacgttgtttcagctttttcttaaagtgagggggccttttcgatgaggcttgataaaatgctagccaatgccgggtatggcacgaggaacgaagtgaaaaaagcactcaaacaaggagtggttgaagtcgacggtgctgttgtgaaagacgggaagctccacgtgcaaccagagcgacaatctgtttgctatgcaggcacccctgtccgttacaaagctgaactttatttaatgctcaacaaaccagcgggcgttgtgacagcgacagaagatgcgaggcagaaaacggttcttgatttaatgaaaaatgaatggggacatatgaagccgtttccagtcggaaggttagataaagatacaaccggattgttgttgttaacaacagacggtgccttttcccatgagcttatggctccgaaaaaacatattgctaaagagtaccgtgctttagttgaaggtaaagtgacacaagcagacgtggaagcattcaaaaacggtgtcgttcttgatgacggctactgcacaaagccagcccaactagaaattgaagaatctggccctttgtctgcgatatcgttagaactgacagaaggaaaattccaccaagtgaaacgcatgtttgcagcagttggcaaaaaagtcatcaaactggagcgaatacggattggcagtttgttgcttgactcaagtttgccaaaaggtggttatcgtgagctaacgccagcagaaatacagctggcgaaaaccccgtatataaaaaagaaaagcctttgaaaccatggtttcaaaggctttttccctcatattaggacacttttgtttttttactagttgctttccatttacccctggcagaacttgtgactaaattattgtactccaatacatttaaatctcgctgcacagtgcgctgtgtgatgccgaactcttcaactaattcattcgtcgtgacagttcccttctgtttgatgtacaagtagatggacttaattcgagtcagcatacgatcagttgaagtttgcaaaaaaccactccttcttcgtcttcgtctcctataccttatagctatcctatgcataagcgcatctggcagaaccgagattcgtcgcataggggcgtcaggtgaggcgatggtcctatgttttcgtgcatcttcccgtttgcaaatggaggtgcaatttgggatacttctagtgtacacgaaaacaagcgaaagcgcaaagaagaaatcatgtaaattcttgggcatttacactgtaaagacaatgaaaaaagtgtaaaacccgaacatttacaaagtgaaaaggggaaattttatggtaaacggaattaaccatatgacgttttcagtaagcaatatggataaagcggtttctttttataaacatgtcttcatggaagcgcctcttgtcttaggagaaaaaacagcctattttaccattggcggcacttggcttgcgcttaatttgcaaccagacattgatagaaaggagatcaggcagtcgtatactcatattgctttctcgattgaggagtcgcagttagacgctttttatactcgtttgctggaagccggagccgatattctccctggaaggaaacggcaagtggaaactgaagggaaatccatttatttccgcgatcctgatggccatttgttggaagtccatacgggcacacttgccgaacggttggcacactacgaaaaaactgcgcctgacatgctcgtaaacatagacgagcaaaataagaagtagggagctctcactgcatacgttacttacatgtctctaaaaataactggtttcagctttgcgaagccattcaatatatgaaccgcccgctttgtcttactacaaatcacacatgtctgtcccctccttaccgtttggggtaacaagctacgtataaccattcattgcaagcgtgatagagcccgagaaaagctttcccattctggttgttatcctctcacattttatgccttgctatagagtaaactctaggcactatactaaaaacatccaaggggaaagggaggattacatgatgaaaacaatcttgattacagggacatcaacagggctcggaaaagcaacggccaagtattttgcggagcgggggtggaacgtcgcagcaacgatgcgctccccggaaaaagaaacagagctcatcaattataacaatgtttttatcacccgtatggacgttcaacagcctgaaacaatcgatcgagcggtaaatgaagccatagagcgttttgggcaaatgaatgtactaatgaacaatgccggctatggagctgtgggggtatttgaggctgcttccgaacaacagattcataaccagtttgacgttaatgttttcgggcttatgcgcgtaacacaagcggtgctgccgcatttcagggcaaaccggaatggagtgattataaatatttcttctcaaggcggaagaatcacgttccctctgacctctttatatcatgcaactaaatttgccgtggagggattctccgaatcgttgtcctatgagctggcttcccagaatatccgtgttaaattgatcgagccaggtattgtgaatactccatggtacagtgcagctgtacgtttgaatcatgaggcattgtcagactataatcgttttactgatttgtttaataaccaatttgaaaaattcgttcaacataatgcccatcttcaggccacaccggaagcggttgccgaaacgatttataaagctgcgatggacgaaagcgatcaattaagatatcctgcaggcaaagatgctgaaatcatattgaagaagcgggcacaattgagtgacgaggaattcaaggcgtacatgaaaaaccaagttctcggctaaggaggaggttcttataaagtattcaatcggccaggtagcagaagaaacgggattgtccattcatactttgcgttattatgaaaaagaggggattctccctcctattaaacgagatgaattcggtgcacgagtctttgatgaggaagccatggaatggctgaggttcgcatgctgtttgcgggatacggggatgaccattgaagaaatgaagggattttcccaattaacccttcaaggagacaaaaccattccggaacgtgttaagcttttgaaccggcagaaggagcgtgtcgcgaatcaggtcaagcagctaatgaaaaatatgtccatgattgagcaaaagcttgaaatttacagggagaagctttaaaggacctcttatagagtttgctttttttaggattcggcagaaaaagaccatatataacagcaagtttttcggacaaccctacaaaacggtgcaatagaagtcggaagggcgcttcagaatcctgctattcttacctgaagggaggttgttcatgtggattggctagcgaatttgaacagggctttgcaatacattgaagatcatcttactgaggatctgaatttgaaggaggccgctaggcaagcttgttgttcagattaccatttttcgagaatgttttcatttcttgctgggattccgttatctgaatacattcgccgtagacgtctgacactagctgcattcgagcttcagactagcgattcaagagtgatggatgtggcgatcaagtatggctacagctcagcggacgccttttctagagcctttcaagcattgcatgggatgtcaccctcactggcaaagtccaatggtcatttattaaaggcttatccacgtatgactttccaattaaccgttcagggaggaagcgtcatgcattatcgtatcgtagagaaggaagcattccgaatcgtcggtatcacgaaaagggtacctatccaatttcacggcgtcaattcggaaatcgagtcgatgtggagccgtttaacatcaaaagatatcgcgcagctcaaagccctttcgaatatcgaaccgcaaggactggttcaagcctcggtgaatttttcggaggagcggatggaggagaagggattgcttgatcactatatcggtgtggcaaccagcaaggagtgtcctaagcacttaacgaagttggaggtttcaaaaagtacgtgggctgtattcgaagcggtcggcccttttccagatacgttgcagaacgtctggggccgtatttattcggaatggtttccttcttccagctatgagttggcaagagggccagagatgctatggaatgaaagcaaagagttaacctcgccaacgtttcgaagtgaaatttggatacctgtcattcaaaaacaagtctgagctaatctgtgaaaaacgcgattcacgaagaggggctgtcccataaggtccattacatgaccttatgggcagtctttttagttatcctaagcaggtgcaacaacatgagtgaagtgtacgtaactgattaaactccggaaagtgggaacactctagttgataagaacctattcggattgatacaggtcggtcgataaatagcgctcgcctgtatcacaggcgatggcaacgacgtgatcgcctttgtcaagcgtcttggccatttccagtgccgcaaagcaagccgctccagaagaagggccgacaagaatgccttcaagccgtgccaagtcttttgctgtcttgtatgcatcttcatcttcgatccgcctaatctggtcatagatagctgtatttagtataggcggtacaaatccagggcttgtaccgacaagcttatgcgggccaggcttgccacctgacaaaacaggtgatccagctggctccaccacatgaataagggcatcagggtaataggttttaagcacttctcctgtgccggtgatcgtgccgcccgtaccagaggctgcgacaaaccctgaaagtgtggcgccaattgcatctaagtcttgtttaatttctatggcagtggtacggcggtgggcatcagggtttgcttcattttcaaactgcattggcatgaaagagccaggaatgctttcggcaagctccttggctttttcgatggccccaggcatttttttatcgccttccgttagcacgacttcagcgccatacgcctttagtaaattaatccgttcttggctcattgtatcaggcatgacgagaatagcgcgatagccgcgggccgcagcgttcatagccaagccaatcccagtatttccactcgttggctcaataatggtggaaccaggttgcaaatggccatccttttctgcttgaataatcatggaaaaggcagcacggtctttcacgctgccgctcgggttattcatttctaattttaaatagacagatgcgccttcactatcaggcagcttgtttaaacggaccaaaggcgtctgtccaattaagtcagcgatattgtctactactcgcatcagtaatcacctctttaaagttccatttatttagtttaacataaataaggcaagccagcttattgaacgcttaggaggacaacatgaacgaactacactattttttagctttgcccctttctgacgatattcaatcggccatttgttcacatactcgccgttttgtccacgaagagcgatttaaaaagtgggtccatccggctgattatcatttaacctatcatttttttggttccttacaagcaaaaaagtgggcagaaacggaaaaagagcttgcccgattgactgcaacgttcacgccgtttgtgttgcagtttggcgaatacgggacattcggcaaggaagacagtccgagaattttttacatgaaacctgacccaatagaagatacgctagtgcaacaacacgcccaagttgtgtcgttattggcgcaacttggttacccagtcgacagccgtccattttctccccatgttacgatcgcccgtaaatgggttcatagaaagccctatgtacagccgccatctcgttttcattactcagaaaaagtggagcgcttgtgtttgtacaaaaccgttactggacaaactccgaaatatgaagaagtctgttcgtttccgtttttaggtagggaagagcagtgaagtggctgcgttttgttttgcaaattattgggctattcatctttaatcacattggcggttggcttgctgctgttctccatctaccactatcaggaagcctagtaggcatgatgctcttgtttgtgctccttgtgactggcgtagtgaaaagcaagtggctagaagacggtgcgttggctttgcttgcatttttaccgcttttctttgtgccgacgactgtcggggttgtcgctgagcctgctttgttttcaatgcaaggcttgttgttggttggtgtgacaatcgtaagtacttgtgcagtcatggttgtaactggttatgttggtcaattattagcaacgaaagaggaaaagggggaatcagcccgtgctgaacaatctgaccaccaccttggccgctagcggggctacgcttatcgtctttttggctgcagttgctctctataaacggaaaaaaacgctattgtttttgcctttgcttgtgacaacagctatatcggttttatttttattgctaagcggcattacgtatcaacattatcaggaggcagtgagctggatatcgtccttccttggaccggctgtagttgccttagccattcctttgtacaggcagttgccgctcataaagaaatattttcgccctctgatcattagcattacaactggtgcgctgtttggcgtcgcgagtggctttatgcttggcgcattagttggattaaaaatggcgtttcttcagccgttgttgacgaagtccgtcactgccccagtggcgatggatataatggcgcttttaaatggaaatataacactagcagcaattttagtgacaatcgcagggctaacaggcgcgattgtttcaggcacgttgtttaaatggactcatatttcacactttattggcaaaggtgtagcttttggagctggcgcccatgcaataggaacggcaaaagcgcttgagcattctgaagcagaaggggccatttcttccatttcaatgatcgtttgtgcgattatcgtttcgattgccgtcccggttggaggtaccgttttattgacaatcgggtggtaactaacctttgtatactagcagatattcgatgatgattcttttatattgaaaggggagcctagtaaaaataacgataaccaacaaatgatgatgagtagatgaaaagaaaatttaagaaaacgcttccttctttgtatgactatttagtatgatcgttttagataaccgtatctccagttgacgttctggacatgattttttccattaaaggaggctacaacagtgaatcaacaaatgagcagagcaattttgaattccgattggtataacggttctgttaaagctgcttggagtcgctatttaaggaatgaggagatcttgcaaagtgaattgagaagtgagattgctcattcatgggaaacatctaaagatttaggggttaatccgtttcaaagccaaataaacgaaatcataaacgatcagacgcttgcgattcgattaaaacataataagcagttgttgtcttacgcatcccctcgcattcagcagctcctcgatttatttgatgattcgaagacggtcctatctattgctgataaagatgggacgattctgaaatctgtaggggaaaaaaacgttttaaaaagagcagagaagcgctatatttttgcagggggcacttggaccgagaagtctgcaggcacaaatgcagtggggatggttctgagaacgaagcaatcgtctcaagtcttgttttctgagcatttttgtgaaaatgtacacgattggtactgtgttgcgtttcctgttttagctccttttacgaaagaattactaggcattgtgaatctcgcaggtaatgcaagtgatgttcatcgtcattcaattggttatgcactggctgaagcgaaaaatatggctctttcgcttgaacgccatttttttgaatatgctttacggcatcacctatttttacacacagcactggaaaagatggatcacatcgtgttgtccgtagatttaagcgatcaaattctcactcgaaatgagggagcgaatcgaagcgaacggtttcaaaacgagacgtccatagccagctttcctgaattaaaagcattagtggctaacgttcggacaaatggccagcaaatcgtaaatgaacaaattcaagacggatcaacaaataaacgctatcaagtttccatttaccctgtccgttttcaagaccatatttatggcgttgtcatttttcttcagcaagatcagagagtagtgaacaaaaagaagccgtcccctagaaaagcgacaacgcgttacagtttttccaatatggtcggtgtgtccccaacctttcaggcgctattaaagcaagcggaaaaagctgcgagcttgcaatctactatattgatatcgggcgaaacggggacaggaaaggaagtgttggcgcaagcgatccaccaggcgagtaaccgtggcggaaaaccatttgtagcaattaattgcggagcggtcccaccgagcttgcttgaaagtgagctttctggttatgaagcaggtgcttttactggcagtaaagcaaaggggagtgcaggaaaatttgaacaagcaaatggcggcaccatctttttagatgaaattggcgatatgccgttagatttacaagtccatttgctgcgtattttagaagaacgggtcgtgacgaggattggtggcagcgtcccgatacctgttgatgtacgagtcatatctgctacgaataaagatttaaaggaagcggtgcaaaaaggtacctttcgtgaagatttgtattatcgtttatgtgtcctgcaaatggaacttccaccattaagggagcggagtgaagatatacctgtgctcattcaatctttcttgcctgctctttgtcaagaatttggaaaacagatgattagcttaacgagagaaacgttaaccatcctcgaacgttatcattggccgggaaacataagagaattgaaaaatgtacttcagcaagcgatgtttgtgatggacggcgatgttatccatccccatcatttaccggacagcttctattcacaaacacaaagtgatgaatatgaaaaacaaaaactgttgcgtgcccttgaacagcaggaaggcaatgtaacaaaggcagcagcttctttaaatatgtcccgcgctaccatctacagaagactaaaaaaatatcgccttgaacgccactaagtataagcgtagacaaagtgacagttaaacactttgtctacgcttttttgtttcctgagacaatggatacacaacctgtttcagatgatacatatcaatattcgacagcaaccgcgaagatgcggtaaacacgggctccacataagcaaaatagttggcatggaaattgcaagattaattgatgaaaaagtaagcgcttgcttttagggcggaaaggagtgtggcttgtcaatcgattgaatatcaactaagaggagggagaagggattgaaatcatttgatttaaccgttgtcggtgcgggtcccggaggttatgtagcggccattcgagccgctcagctaggcatgactgtagcactcattgaccggggcaaacctggaggaacttgtttgcatagcggatgtattccttccaagattatgctgcagcacgggggacgccttgaggacattcgacaagcacaagaatgggggattgaaacatctgtagtccaagtagatgattctaaactgtttcggcgacaaaacgccattattcaatcattatcggcaggcattgcccaattgctaaagaaaaatcgcattacgtttttccaaggagaggcaacgatagatggatcgcaacagctcgtttgcgatggtcacctcattcaaagtgaaaatctattactggcaacagggggaaaaccgtttattccgccgattgcgcaactagaaacgattgattatatgacgacggatacgttttttcagcaaacatcgctgccaaaatcgctcgtcatcattggagggggtgtgattgcagttgagctcgcattcgccgtctctccgtttggcacaaaagtgacgattttagaagtggcgtcggatattttgcaaacagaagatgaacaggcacgggcggttgtgaaaaagcagttgcagcagcgaggcgtggaaatcgagacaaatgtcgtcattgaaaatgtgggacaagggcttgtccgaacggcaaatgctgctttcccatttgaacggttgctagtggcggcgggaaggcgtcctaatacggaattagcggatgccctgcatttacaaaaagacgcaaacaatcgtttcatcgaagtaaatccatattatgaaacgagtaaaaagggcatttatgcgattggtgatgtgattggcaaatatgaattggctcatgcagcgagtgcggaaggcattgcggccgtcgaacatatggcagggataaagcagcagccaattgacgaacttggcatcccccgctgtgtttataccgatcctgaaatcgcttccttcggtttgagtgaaaaagaagcgaaagaacgaggttacgaagtcaaagtctcattttcagcaaatgccgcgaatgggaaagcgctcgcagaaggggacacatctggctttgtaaagctgattacagagaaaaaatacggtgaactgctcggtgcagtgattgttgggaaacatgcaactgagctaataggagagttgctggccacccgagtatcagaggggacgatttcagaattacagcaactgattcatgcacacccaaccattgctgaagtcattggcgaaagtgcactggcgtttagtaaacgagccattcaccagtaagaaacttcattagaaggaggagtaaaaatgaagaaaaaagaagccttatggatttaccaaaaaatgaatgaaatccgtttgtttgaggaagaagtacaccggaagtttggggaaggaatcattccaggttttgttcatttgtacgccggtgaagaagctgtggcgacaggtgtttcggttctattggatgaagaggattatatcacaagtacgcaccgcggccacggccatgcaattgcgaaaggctgtgatattaaccggatgatggccgagattatgggaaaaaaagatggacttggcggcggcaagggcggctctatgcacgtggcggatgttgaaaaaggaatgcttggcgccaatggcattgtcggcggtggttttggacttgcagcgggtgcggctctaacgattaaaacacttcggcagaatcatgttgctgtttgtttttttggagatggagcatctaacgaaggtttatttcacgaaggacttaacttagcgtcgattttaaaattgccggtcatctttgtttgtgagaacaatcaatttggcgagggaacgccgttccgttatgccagtgcttctgaaacggtcgcagaacgggcagccgcttacaatatgcctggagtccgggtagatggcatgaaagtagaggatgtttatagcgcgacaaaagaagcgattcggagagcaaaagcaggtgaaggcccaacgttaattgagtgcgacacctatcggcattacgggcattttgaaggagacgagcaaaaatataaatctgaagcggatcaaaaccgtgatcgtgatcccattcctgaatttcgaaaggtcgctgttgaaaaaggctggatgacgaacaaacaagcggatgagattgaaaaagaggcagcggaaacgattaagaaagcgagcgaatttgctcaaaaaagtccacttcctgatgtggaatcgttatatacagatatttttgcttaagaaggggaggaacaaaaatgacagaacggatcgttacatttatgacagccattaatgaggcgatggcgcaagcaatgcggaaagacgacaacgtcatattaattggtaccgacgttgctggcggagcggaagtcgaccatttagtacaggatgatggccggtatgatgacgcatttggaggggttttcggattatcaaaaggccttgttacagagtttggcagggaacgggttattgatacaccgattgcagaacacggttattttggtgcagcggtgggagcagccgcgacagggcttcgtccgattgcggagcttatgttcaatgattttatcggctttgcgttagacccgattttaaaccaaggggcgaaaatgcgttatatgtttggcggaaaagcgagaatgccgcttactgtccgaaccgttcacggtgcaggcgcaggcgcggctgcccagcattcgcaaacgttatacggcatgtttggagcgattcctggcgtaaaagttgttgtaccttctaatccttatgatgccaaaggcctgatgttggctgcggttgaagaagacaatctcgttgtgttttctgaggataagttgctttatggaatgaagggccacgtaccagaggattattatacggttgaaataggcaaggccaacgtcattcgcgaaggaaaggacatgacgatcgtagcgattgggaaaatggtgcaagtagcagaggaaacggctcaaatgcttgcaaaagacgacatttcagtagaagtgattgacttacggactgttgcgccttgggatgaggagacggtcatggattcggttaagaaaactgggcgtttaattgtgatagatgaatccaaccctcataacaacacggcgactgacatcgcatcagttgttgccgataaagcatttgattacttagatggaccgattaaaacggtctgtgcaccgcatacacctgttccatttgcgacaaatttggagcaggcgtatattcctgatgctgctaaagtattacgcgtggcagatgaaattattgccgatttaaaacaataaatatggattttggaggaggtgaatgacggatgggtacaatcgtaatgccgaagttaggaatgaccatgtctgaagggacgattgtcaattggtgtaaagaggttggtgagccagttacaaaaggcgaggccattgtggaaattagctctgaaaaattaacacaagagctagaagcacaagaagacggtatattattagctaaatacggtgatgtagatgccgtcatgaaagtcggtgaagtgttggcgcatattggccaagaaggagaagaaataccagaaacggctgcaactccttccactgcgccacaattatccacgtcagaaacagacacggcaagcaaaacgcctgccaaacaagggcaaaagaaaggcgaagaacgtatttttattacgccattggcacggaagcttgcaaaagaacataacgtaaacatcgaagaagttgaaggtacaggtggcaacgggcgcattacaaagcgtgatatcttgcgagaagcatcaaaccaaatatcaacccaagcagtcaaacaagcagcaaatgaaaacgcgcaagtggcgcactcagacgacataggggaaggcctgtctccgatccgcaaaacgatcgcccgtaatatgcgcgccagcttgcacaatactgcccagcttacattgcatcgtaaggcccatgcaaatgcactgcttgcctttcgtcgtttattgaagacagaatcagagtctcaccagctacagttgaaattgagcgtgacggttcttattgcccgggcgacgatactggctctccagcaagttggtgccatgaacagccgctatgagaatggacagcttaaagaatttgaaaatgtccatttaggaattgcaacgtcgctggacgatggacttgtcgtccctgttattcgaaatgccgaccatttatcgatcggccaactcgcaacgaagattgagaaaatcgctgcaaatgccagaagcggccaaagcaatccagatgagttgtctggctcgacttttacaatcacgaatctaggcgcgagcagcatcgaatactttacgccgattttaaacccagcagaaacgggcattttaggcgttggctctttgcaacaggaactcgctctttcagaagacggacaagtggagcctgttcaaaaaatgccattcagcttgacgtttgatcatcaaattgttgacggtgtgttagcggcacaatttttagatgcggttgttaaatatgtcgaaaatccacatttgcttatcctttaagaatgaaaaggagctagggtagaaaacgccctatgctcctatgaaagttgacaaaaaaacctgtcttctcagcacctttattgttcgctatgcaactgacaatagaggtgcttttttattgcttcataatgagcactgtccgtgcttggaaatgcccctaatccgttttgtatctcattataagcgccaattatcacgacccttaagcattgcactctcacagcgtccatgatgacaggttcaatatagacattgaagttcgatgatgaacccgttataatgaaaaagccgttgttttttagaacgtttgggcaatctttccagttaactgaaaaggttgctttcttttgcctagagctgttcaaaaatgaaggaggtattggatggttcaggacagctttcaaacgccagatgtaagccaattccatttaagggtccgtaaagtatttaattggcttggtgggcatgagtttatgattgaattgttaaaccgcgaagagtgcattggctttggtgatacggttgccgaagcaaaacagaatttaaacgaaagcataaagctgtgcgtgcgccagcacggagcggattcgctgccagagccgattcaaggtgcgcaaattattgtattagaagcgcagatgtctgaagaggaattcgcggccattaaccatgagttgattatattagaccaatcctaacaggcatgtacaaaaaatgtacgtgctttttgtcaaagttgaaaggaggcaggcgaatggaagaaaagcgagttgtcgttactggtggagctagcggcatagggaaagcgattgctcttgcatttgcgcaaaaaggggcgctcgtttttatccttgataaggaagaggcactttttcaaaaatggagtgaaaaagcggagaacattgtgttcattcaaacggatgtcaaagaagagcgcgatatcaaggctgcttttgccaccattgcctcccagtctggacctgtggacatattaatcaacaatgcaggagtctcaacatttacgccattattcgaactaagtgtggaagaatgggacaatgtcttgaatacgaacttgcgcagcgtttttcttgcctcaaaagaagcagctttacatatgcaacctacagggaagcctgctagcattattaatatttcctcgacacgggcgcgcatgtcagagccgaattctgaagcttatgcagcctctaaaggaggggttgaggcgttgacccatgcattggcattatctcttgcagaaaaaaacattgccgttaatgccattgctcctggatggattcatacaacgaatgacgccttaagggagatcgaccatgagcagcatccttcaaaaagagtgggaacgcctgaagacattgcgaacgcatgcctgtttttagcggatgagcgcaatcggtttataaatggcgaaacgattgttattgatggtggtatgacgagaaaaatgatgtatgagcagtaaaagcagagctggcatgatggccactctgcttttataaacgttaaaagacaattgttttattgttataaacaatcaattggtcatttaaatgccagtttacagctcgggccaatgcaatccgctcgatttgacggccagcgattcgcaagtcggcggttgtatggcggtggttcactcgtaacacatcttgttcaataatcggaccctcatccaaatcgtctgtaacgtaatgggcggtagcgccaatcagttttacgcctcgttcaaatgcttttgcataagggttggcgccgataaaggcaggcaaaaacgaatgatggatgttaatgatttgttgagggaacgtgctaacaaatgttggcgataaaatttgcatgtaacgggcaagaacgataagttcaatattgtgttcatggagaagttcaattgctttgtcctctgcttctcggcgattagcctttgtagacggtatatggaaaaagggaatgccgtaagcttccacttcttctttattgtcaggatgattgctaatgacaagtgggatttccgcataaagttcgccagctcgccacttccataacagctctgacaagcaatgattttcttttgagacgaaaatcgccatccgcttttttcgcgaagcttgctccatccgccattggtaatgttcagcgtctgcaaggacagaaaaagcttgtttaatttcggaaaacgctgttttttcttcctgccatgcaaattcaattctcatgaaaaacatgccgccctcagggtcagtcgaatattggtcagattggacaatattcgcctcatggttgtatagaaaagatgatatgttggcgaccacgcctggacggtcttggcaggaaacgagcaaacgcgctcgttgttgttcaatagccattttgttgttcctccaattttgagcttacacatcccctcctgtctactttgttttttaaaagcgcaaagtagaaggaaaggctgacttatttattgaatcagaatcgcaaagaatttgtcaatcgcttcaaggagcgcttgcgtcatttgctggataaagaggaggcatgtcatttgcttgaaaacgtagtactccaaggaactggcctggttttgccgcttaaaagaatgtcattgacgatttatctccatctttggtaccattgattcatctattggtcaacgtgtctattaagccagccgctgtcaacgagtgcatttgtcaaaattgtaacggcagagcctgtccattgcgctctgcttcttttaatgaatgctttcccagtacaacatgcgttatactaaaaaacgagtatgcagcaaggaagcggaagaaaagaaaaggaaattgagggtgaaccgggtggaattgtttttaggagaaggatgggatgtcatgcccgctggtggcgcaacaggcgaagcctatgtagccaaacacggtgactaccaattattcataaaacgaaattcatcaccttttcttgcggttctttctgccgaggggattgtgccaaaactcctctggaccaaaaggttggaaagcggcgacgtgattactgcacagcggtggattcaagggcgggaactgaaggcaaaggaaatgatgaatgccagtaccgcagccatgctttcgaatattcatcgttcgaatgaattgcttgatttgtttaagcggatgggcaatgagccgttagatccacggcatatggttgaaaacatgtatgtccaaatccaactatacagaattgaggacgagctcgtcctcgcttgtatggactacttagagcgaacaaaagatcaacttggcgatgccgagtatgctgtttgccacggcgatattaatcataacaattggatgcgagacgaacaggacaacctttatctaattgattgggacggtgcatctgtggccgaccccgcacttgatctcggtttgatgctgtacacgtacattccagaggagcattgggctacttggctggctcaatatggtgctgaattggatcattcccttaaaatgagaatgcattggtatgtggtcgcccatacgatctcagaaattttatggaaccatagcaggggccaattcagccaagtcgaggaactcaaaaaagcgctgatgtatgtcgcttccaaaaatgatcactcagactgatcgaaagtctggtagctcatcttcatagatgagctatctatttgtgtgccatccctcattatgtaagggatgacattgtgttaagccattgctggacggcttcactatccattgtctctgtatgggaagcgctcgaaatttcgtcaatggtgcttgccagcgctggatcgagagcaggatcttgggcaagcgccgtcaaaatttgtttcaactgttcagattcatttgtcgtcaggaacttttcgctgacatggttttgcagcaagtcttgcaacaaacctaatttatgttgaatggaaattggcatgagggcacctcctgcccttatgttttgcgcaatagcggtttttataccatttaacagtcaatagcagtgatgaaagagagaaagagggatgaagtttgcgtttacgtcataaaccatgggctagtgaagaattggcaaagcggccgaatttggtcattcaacagccggagcagcacaaagggaattggaacaactgcttttgtacagcccaaccattatatgtggaagtgggaacagggaaaggaaagtttttgacgggtatggcgaaacagtttccgtccattaatttcattggcgtcgaacgctatgagagcgtcttgttgacagctatggaacgggtggaagcggaaaaattgccgaacgtcaagttgcttcataaagacgttgctcagttgctggaagtttttgctgaaaacgaagtggatcgctttttcattaattttaccgatccatggcctaaaaagaagcatgccaaacggcgccttacgaatgaaaggtttttaacaatttataagcagttgttaaagcaagatggagaaatccactttaaaaccgataaccaagggttgtttgaatactctttgcacagtatgtcgacttttgggatggcttttaaaaatgttagtttaaaccttcatcaaagtgggatggaagagaatgtgatgacggaatacgaagagaagttttcggcaaaaggtatgccgatttatcggctcgaagcaacattccgaccataaaaaagaagcccaattaggttttgggcttctttttaaatctcttgtaaatcaagcaaaacacctgttttgacatcagccaaaaattcatactggacaggcccgtcggttgttgaactggttatgcctccacggtatgcttcatatgggaggccaaagcgagtaatggattcaggctgcatatgaatccaagaaccgctaatcatatattcttgctggacaatcgcttttacacgtttcagcacggcttcaggagtaagctgttcttgtttccatgctttgcttgccaatacaccaattaatacgcccacacctaagcctagtgacaatcgtttcatctttaacaccctttcgttgtacaagaccttttatacccagtataacgaacgagcgtgaaattgactatcgggaatggtggaaactggcacgacccaccaaaatcagctacaatgaatgtgccgtttttgttgctaccgataaccgttaaatgcagcaatacataagagatcccgctaccggggtcttgtattttatgccttttttagcagatggaggaggtttttatgaacgagaaaacaaaagcgctttttcaaacattgacggagcttccaggaccgtctgggtttgaacatgaagtacgccgctttctaaaaagcgaattgcaaaaacatacagatgaaattgtccaagacaaactaggcagtgtgtttggcgtgttgcgaggcgatgcgtcagggcctaaggtgatggtgtgtggacatatggacgaagtcggctttatggtgacatccattaccgacaatggcttaatcaaattccaaacacttggcggctggtggtcacaagtcctgctagcgcaacgcgtaaaaattgtaaccgatcaaggcccaattatcggagtagttggctctacaccaccgcatttgttgaaggactcacaacgcaagaagccaatgccgatcacggaaatgtatatcgatgtcggcgctgatgataaagaagattgctttgcgttaggtataaagcctggtcagccgattgtgccagaatgcccgtttacaccaatggcgaacgaaaagaaaattttggcgaaagcatgggataatcggtacggagtcggcttgtcaatcgaattgcttgaagctataaaagggaaagctttgccgaacactgtttattcaggcgcaactgtgcaagaggaagtcggtacgcggggagcgcaaacagcaagcaatatgattcagcctgatgtcagctatgtcctagatgccagccctgcaaatgacgctactggagggaaggacgcttttggccatcttggcaaaggcgcattgctgcgtatctttgataggacgatgattacacataaaggcatgcgtgattttgttcttgatacagcagaaagccataacattccttatcagtactttgtggcggcagggggaacggatggaggccggattcacacttctggcaacggcgtgcctacagcagtcattggcgtatgcgcacgttatatccacacatcgggatcgattcttcatgttgacgattatgccgctgcaaaagaattgttgacgaagcttgtccttgctactgacaaaacgacttatgaaagtttgattgcgtttgaatagcgtaatgaggaataaaaaagcagcagtcggctcgaaaaaccgtgccaaagtccatgccgtccaagacgttttgatccaggaatatattgaagttgtctctgttgctgccttgtctcaagttgcggcacagccattttcggatgatgagacgaaagagggcgctgtaaaccgcgctcgtggagcgcttgacgctacagaagctgactttggttttggtttggaggggggtgtctcagaatggcaagggacgctttacttgtgcaactggggcgcgcttgccacccgttctggacaattatatacggcagcgggtttgcgcttgcctttgccgactgacatagccgccctcctttacgatgggctcgaactaagcaaggcgctaaaacaagccgtccctcatgttgatgttagccaaggcgccgtcggccatttaacaaacggtctgcttacccggaaaacgatgttttctgaagtggttcgtgcttgttatggacagtataggctcgcaacagacaaacttcattaaggaagtcagcccccgtggatggagggggctggctattcagactgtaaacaaatgctcgcgttttctttttgcttggaattttactcttcttcaaatacataagatagggcggcaatcgcttgcgccggcgtttcgacaactacttgtgctttgttagacagctcttttaaagcgtgatgaagcttttcagggcgaatcaaaattaacggttttcccgcttcaatggcagtggcggcatccatggctgtattccattgtctgtaatcttcgccgaaaagagcaatgaccgcgtctgcacgctgaagccaaatccgcgtacggaaattattaatgcttgaggcagcttcgtcccgtaatacagcgtttggttgtttgccgagaatgtcttcgccgatcgcatcgctttttccgtgattttccatcgggcctttaaaaacgataggcaattgtttttcacttgccaagcgttttatctcttcgcgccagtcagagtggatttccccagccaaataaacaacaagttccatacaaaaatgcctccttattttcccagactataaacaaaaccttgcagccttcgtttcgtctcgtttatatcctttaaaacgagcgttccatgtgcgcgacaacgacctatgaacaacgttcaaatttgcatattcgcgcttgttacgtgcttcggctgacgttttcgatctgtctgttggtacatatccagttccacttgaagttagaacatacgttttctttagctagtataacataagaagaagcaaagggagcaacataatgattgattttgtttccatctctctcggctataaaaaaagtgtcttgtcacatgaatagtcataggatatgctaaagagcggacagtcatttacaaaaggagagggcatcttgcgggaatttttacgtgaaaagggagtcaacccttcttggcatttatatttcattaaggcaatggggcaaatgacatttgggttgtttgcgactcttattattgggcttattatcaaaacggcaggcgaacagtttggcatagccgcttttttggaaattggtgaactagcaatggatttatatggagcagcgataggagcagcggtcgcacttgccctaggagctccttcgtttgtcgttttggcgaccattgtttgcggtacagccggggcggtgtatggcggtcctgcaggtagttttttagccgccgttgttgctgccgaaacaggcaagcttgtgtttgggtcgacgaaagtagatattctcgttacgccgattgtgacgatcatgagcggttttgccgtcgcctggcttttagggcctgctatttcatttgtgatggaatcgattagcggggcgattgcctgggcgacagaccaacagcccttgatgatgagtatagtggtggcaatcctaatgggatgggcattgactgcgccgatctcaagtgctgcgatcggcctcatgcttggattggaaggagcggttgcttgtgcggctgctattggctgtgcagggcaaatggtcggttttgcagtggcgagcttccgtgaaaaccgttttggcgggttgcttgcgcttggcatcggtacatcgatgttgcaaatgccaaatattttaaaaaaccctcttatacttattccgccaacgattgctggagccgttagcgccccgatcggtacgatttggtttgggcttattaacaatgccgccggttctggcatggggacaagcggtcttgttgggccgatcatgacgtttacggagatgggctattctggatcgcttttcattcaagtcattctgtgctatgttattattccagcggtttgcgctttcatcgtgtcagaatggatgcgccgcaagggctggattaaatggaatgatatgcacatctcttttaattaaaggagcgaatagcgatggaacacattcaatctgaacagcaatttaacgaaataaaagcgaacgaaacagccgtttttttattttctgcagactggtgccctgattgccgggttattgagccgattctgccgcgaatcgaagttgattttccaacgtttacattttattatgtggaccgcgataaatttattgatgtttgtgcagctcatgatatttttggcattccgagctttttagtatatgcaaacggcaaagaagtcgatcgtttcgtttccaaagaccgtaaaactgaagaagaaatcgtcgctttcttaacaaaagctgaagcagcgattgattgataacaagctggagggcatccttcagcttttgtttattcgcttttccgtttatcgccaaacatgttaaactagaggaggaaaaaaggaggaagaagcgtggacttgcaaactttccggaaacaaattgagaaaaagttgcagcgggacggttggacaatccgctatgatcataaagaatcaacattgcgtatcgaagacaaagcgactaaaaaaggggcaacacttgctttaaagcctttgcttgccaaatgggagcgagaggaatatgcggctgtcgacgaggcgctccgcaccgtcgcggtgggtcttgaatcaatggcaaaagccgttcaccttaacggaaacgaaaaaaacatttttccagtcattcgcgcagcttcattcccagataagacaaaggacggaaaaacacttgtttaccaaaaacatacagcagaaacgagaatttattatgccgttgatttaggggagacatatacgcttattacggatgaacttctcaatgagagcggctgggagttaaaggcattagcagaaatggccacattcaatgtgcgttccttgccacagccgttcaaagaggatgaagttgcagggaatcgtttttattttctttcggccaatgatgggtatgacgcaagtcggattttggaccagtcgcttgtgcagcgtatggaacaaaaggcagttgggcagcttgtagccgcaattccccatcaagatgcgctcatttttgctgatatcgaaaacgacactgggtatgatgtactgggtcaaatggctttgcaattctttggcggtgggcgtattcctgtgactgcattgccttttattgttgaaaatgggcaacttgaaccggtctttattatggcgcaaaaaaagcctaaaggctgatggggcgaaacgaaaacctatgctatactaagttggtctaggcgttcgcttctacacgctgaaaacgagtaaggagaataaaacatgaacgtattttataatgaaaaaggcattggcgatgtccttatggttactgttcaagacataagccgcgatgcacaggttgttgagaaaaacggcgatgtcgtcgtcattttgaataaaagcaatcaagaaattgctggaataaacgtattccacgcttcttcttatggagccattagcggagttggtgcgattgagctcaatgaaggcataaaagcgctgctaaaagaagcgtgcgacaaaaatggtgtcgctcttgaaatggaatgggagcagagaccttcttttgttgtcggttatgtagaagaaaaagagaagcaccctaatgcagacaagctttccgtatgccgtgtaaacatcggcacggaaacattgcaaattgtttgcggagccccgaatgtggcagaaggacagaaagtagttgttgctctcgttggggctgttatgccaagcgggcttgtcatcaaggaagcaacgctgcgtggtgtcgcctcttccggtatgatttgttcagccaaagaactagggctcgaaaatgccccggcagaaaaaggcattcttgttttgagtgacgatgaagtggtcggcacaccctttttgcggtagcctaaaaacgaaatggctggctgaatgaggccagctttttatgtagaatgaggctaagggataatcgcgatataaggtggtgaaagaatgaacatatggaaaaaatggcttgactgggttaagggattgaacgaagacgatgaagaagaaaacaacgattatgggcgaaacggggaacccatacagaagtcaatacagaaactggaacgtgagaacaacgagcttcctgagttagaagaagcgcgcatgacttaccgatacgccaattcaaatggggaatggccaatttccaagaagaaagcagggcgtgttgcagcgacacagccgcctactcaaaaaaaggaaaggccagaagagaagcgggacgagctgccaaaagtggtacaaaagaaaaggtctgccgctggtaaagagctgtttcaagggacatttaagtcgacagaaatcccttctcctgtccacggcattcagaaaccggaaaaaacacatgaaaacagtgattacgactggctcattttttcaacgaaggataagcaggctgaatacgcagagcgcctgttacaccggcaaagacctccgcaaattgatagaaagcctgcttttttgcgcaaagaatcacgctcccttgaagaggacgtgttgaagcgggtgcgtgaacatgccctacagtcgcttccacttgccgaagcacagcaacaacaaagcaaagaaatccgtccccaagaagaggcaagtggtgacgaaaacgagcgtacatataaacacgaggaagcagatatggatgaaggagaagccatcgttgcgaccgaagctatgccaggcgaaacaggccaaaaagaagcgaacgaacggtatggacgcggggaaccagagattgaagaggcagagggaacgagtggaaccgacacgttgccaggcgaaacagaccaagaagaagcgaacgaacggtatggacgcgggaaaccagagattgaagaggcagaagtaatcgctggaaccgaggcgttgccgggagaaatggaacaagaagaagcgaacgaacggtatggacgcgaggagccggagattgaagaggcagaagtaatgtctggcaccgaggcgttgctgggagaaatggaacaagaagaagcgaacgaacggtatgaacgcgaggaaccagagattgaagaagcggagggaacgagtggaaccgacgcgttgccaggcgaaacaggccaagaagaagcgaacgaaccgtatagaacggaaatcgacccaactgctgaaattcctgctcctttcaaccgtaatgccgcggataatgaaagaatagagacaaagccgattcagcctattagtgatgatccgacaacatcaactagagagaacgaagaagcacaagctccgtctagtgaaaaaaaagtttcccttagcagtgaaacgaaaaagcaagataggctaagtaaccgaacgagcaatgacaatacgcagcctggcattccttataatgtgctgatgttgccaaaggaccgtaaaaaagcgccaattaaaaaagggcagcacacaaaaaatggctacgaagcgccaccgcttcatttgctaaaagttcctgaaaaaatcgatcaagatgattctctttggcttgacgagcaagcgcaattgcttgaagaaacactatcaagtttccacgttgatgcaaaggtcgttaaccggacaaaaggcccggcggtaacgcgttttgaagttcagcctgcccgcggcgtgaaagtgaataaggtcacaaatttaacagatgatattaagctggcgctagctgctaaagacatccgcatggaagcgccaattcctggtaaaaacgcaatcggcattgaagtgccaaatcgaacgtcagcccctgtgatgctcagggaaattttgcggcgtgatgtatttaggcagccagattcgcctttaacggttggcttagggcttgatatttctggacagccgatcgttactgatttaaagaaaatgccccatggcctcgttgctggcgccacaggctcagggaaaagtgtttgcatcaactcaattttagttagtctgctctataaagcatccccagatgaagtaaagctgttgcttgtcgatcccaaaatggtcgagcttgctacctatcaagaagtgcctcatttggttgctcctgttattactgatccaaagcaagcgacagctgctttaaaatgggttgtccaggaaatggaacggcgctacgaattgtttagccagcgtggcgttcgcgatattagtaaatacaatcagcggttctctgaaaatggcaagccagcattgccgtatctattagtcgttattgatgaactcgccgacttaatgatggtgtcaccacaagatgtggaagatgcgatttgccggattgctcaaaaagcacgggcatgcgggattcatttgctgcttgcaacgcagcgcccttctgttgatgtcattacaggattgattaaagcaaatataccgacgcggattgcctttgctgtcgcttcacaaacggattctcgcacgattctggatatgggcggtgcggaacggttgcttggaaaaggcgatatgctattccatgaaaatggatcaccgaagcctatccgtgtccaagggacttttgtatcagatgaggaaattgaggatgttgtcgcttatgcaaaacaatacggcaagcctgaatacttatttgatacggagacaattgagcggacgctcttacaggaagaagaagaggatgagctacttgaagaggcatgtttttatgcagttgaacaaggtaccgtttccgcttcaagcatacagcgacgctttcgggtaggttataaccgggctgcccgtttaatggaaatgatggaagctagaaagattgtatcaggtgctatgggaagcaaaccacgccatgtgttggcaagtgaagaagacgtaagagaactgtttgggacgacagaaacagcaagaacttgagaaataaagaaaatttctatatgatatggaaggaacaaatcgtgctacaggaaggcgtatgcaaattgcaggaccttttcttaaaaatgacatatactactatataattaatggaacgagggccatgttcgcaaggcgtcgaatacgatttgctttttttgattggaggcttcacgattgacaaactatcactttaccggaatcaaaggttcaggcatgagcgcattggcgcaaatcctgcatgatttaaatgagaatgtacaaggatcggacattgaagaaacaatttttactcagaagccgttagaacgaaaaggcattacgttattgcctttttcgcgcgacaatattaaaaacgggcaacatgtcattgtatcagctgcttatggggaaacacatgaggaaatcaaacgggcgcgggagctcggtttgaaagtggatgtctatccagaatttcttggctcctttattaaacagtttacaagcattgctgtttcaggctcacatggaaaaacgtcgacaacagggttgctcgctcatgtgttagggtctgttgagcctacctcttatttgattggcgatgggacagggaaaggtgcggccaattcaacgtattttgtatttgaagcatgcgagtaccgccgccatttcttaaattactcgcctgattattgcgttatgaccaatattgattttgaccatcctgattatttcaagagcgtggaagatgtcgtttctgctttccaaacgatggcgaagcaagtcaataaagcgattattgcttgcggcgacgatgaacatttgcaaacattgcaggcgaatgtgccaattgtttattatggccttggcgaccacaatgattttcaagcgaaatcgattaaaaacacgccagaagggacggcgtttgatgcctgggttagaggcgatctgtttgggtcgtttgtaatccctggcttcggcgaccacaatgtcaaaaacgctttgtctgtcattgccttatgccactatgaaggcattggctatgaagacattgttgagcacttaaaaacatttgctggcgtcaaacggcgttttagcgaaaaacgttcaggcaagcaaatattaattgatgactatgcccaccatccgacagaaattgcagctacaattgaggcgacaaaaaagaaataccatgaccgagaagtgacagcgatattccagcctcatacatttacgcggacaaaaacgtttttaaatgaatttgcggaagcgctcagccaagccgaccacgtttatttatgcgatatttttggctcggcgagggaagaacaaggttctctttcgatcgaacagctacaagcgcttgttgatggcgcaaaactgttgacggaagcagaaattgaaacgctcaaaggccacggggagtctgttctgttgtttatgggcgctggtgacatccagaaataccaaaaagcctatgaagcattgatcgaatcaagttcgtaattgaatagaaaagccaaagtgagtagcaggtatgaacatgtggttacattaggcagctgattttcagctgctttttttattttgaagggaaaacgcaggcatttgtcgaaaatgtttctttagcacattgcaatttaggtttgatcttattaaacttgggtaaagtatgtaggaaggaggggatgataagtggaagccatcttatacataagcgccttgattgttgcactggcttttgcgatactggttatttatttaatcaaaacactgaaatcagctaccaaaacgcttgaaaacacatcggcaacggtggaagcgcttgaaaaacaactgcgagggattacgactgaatccgaattgcttttgaaaaaaaccaatgttttagcagacgacttacaacagaaatcggagtcgctcaataccgtgtttggcgccgctaaagagttgggtgaatcgatgaaaacactcaaccaatctgttcaccaagtttctaccaaaataagtgaccaaacaagtcggaatgctgaaacagtctcccaagcagtgcaatggggacaggctgttttggatttctatacaaaatttaaacaacgaaagcaacagcttgatcgttgacaaacaaggaggagttagaatgggtgatatgaatacaaaagactttttgattgggacgttaatcggtggaattgttggcgcgacaaccgcattgtttctcgcacctaaatcaggaaaagaattacgtagcgacataagcgatcaagcgagcgccgcttatgaaaaaggcaacgaatgggtggacatagctagagaaaagtcgaacaatatcgccaaaagtgtaacagatcagtctatgcaagtggttgaaaaagtaaaagatttgagcgcttctgtcaaaaaagaagcagaagaccaagtaaatgaagcggcgagtcttgctgaagatttaaaacaggatgcaaaagaagcttcggaaaccatttcagaaacagtcaaaaatgaaattgaagaagcggaaaaagaagttcgcgccaatgcgaatacggaaagctaaaagaaagcaaacaaaaagcgcgatgagaccgagttttcatcgcgcttttcctcttaatctcactttattacgtaaaagcgtctaagtaataaagaaaaagtccgtgactttttaacgccagtcagctataatagacaaaagttaaatttctgacagagagaaaggtgcggagagacgatatgagcaatgaacagttggattcccttagagatgagttagacaaagttaaccttgctattcttgaaaagattaatgagcgtgcgaggcttgtaaaggaaattggcgatattaaaagagaacaaggcattaaccgctttgatccagttcgagaacggagcatgctagaccatattgccaaacacaatgaagggccatttgaaacagcgacacttcagcatttatttaaacaaatttttaaagcgagcttagagttgcaagaagaggacaacagcaaagcgctcttagtatcccgaaaaaaacagcctgaaaacacgactgttgatgtcaaaggggaaaaaatcggcgatggccagcaacggtttgtttttggcccatgtgccgttgaaagttatgaacaagtgctagctgtggcgaaagagatgaaaaagagggggcagcgccttctccgaggcggtgcttttaagccacgtacgtctccttatgatttccaaggcctaggtttagaaggcttaaaaatattgaaacgtgttgctgatgagcttgatatggcggttattagtgaaattgtcactccagctgacgttgaagtggcaacagaatatgtcgatgtcatccaaattggcgctcgtaacatgcaaaactttgaactgctcaaagctgctggctctgttaaaacgcctgtattgttaaagcgtggcttatccgcaacgattgaagaatttatccacgctgctgaatacatcgtctcaaaaggaaacagtcagttgatgctttgcgaacgtggcattcgtacttacgagaaagcaacacgcaacacgctcgatatttccgccgtgccgattttaaaacaagagacacatttgccagtaatggttgatgtcacacattctactggacgccgtgatttgcttctgccagccgcaaaagcagctctagcgatcggggcagatgcggtgatggcggaagtccatccagaccctgctgtcgctttgtctgattcagcgcagcaaatgaattttgagcaattcaatcaatttttagatggcttaatcgaatcaggcctttacaaagctccaattaaacaagcgtaatcaaaagcagctcaaagaaattttgagctgcttttctgtttaaaagcatctaaaaaggggcattttagtaatactgttataatgaaaaaagaaaactgtttttcaaatggtgaaaaagtatgaaagatagtctttaatcattgcaggaaatcttagtgtatcgtatgatagaagaaacattacaatgaaaaacagttattgctatcgtatatgatacacaatcatgaatatcgtcatagtgaggaggaagctgctgcgtataagctgcgcgggcagcaaaataagatgaatacgaccatttatgatgtagctagagaagctggcgtctcaatggctactgtttcccgagtagtcaacggaaacccaaatgtaaaaccgacaacaaggaaaaaagttctggaagcaattgaacgcttaaattaccgtccaaatgcagtagccagggggctagctagcaaacgtactacaacagttggcgtcattatcccggatatttcaagcattttcttctcagagctggcgcggggaatcgaagacattgccactatgtataagtacaatatcattctttgtaactctgaccaaaacaaagacaaagaaattcacttgattaatacgttattggaaaagcaagtggacggtattgtgtttatgggcggcgaaattacagaggagcatgcggagcaatttaaacgggcacctgtaccgattgttcttgctgccacattagatgatgagaaatcatttccgtcagttaatattgattacacacaagcggctgaagacgcgatccaatttttaattgaaaaaggccataaacgaatcggcatgttgagcggttcgctggaagacccaatcaatggctaccagaagtttgctggttatcgccaagcgcttcagaaaaacaatattgaatttgatgaaaacctgattgtcattggcgattacacgtatgattcaggtatggaagcaatggatgcatttcttgcccttgacgaaaaaccgacagcgctatttgcttcaaacgatgaaatggcgttaggcgtcatccatggcatccaagatcgtggttatgatgtgcctggtgatattgaagtacttggttttgacaatacacgtttggctacaatggtacgtccaaccttaacgaccgttgtccagcccctttatgacattggcgctgtttccatgcgtttgctgaccaaactaatgaataaagaagaagtagacaactacacagtaacattgccacatcgcattgaaagccgtggctcaacgaaataaccttgcaagactgataaaaaacgttcggtgatcgacgatgccacgggcgtttgtttacaagctgaagccggatcttaaacagatccggctttattcatgcttttccccctgtttctgtgctgcttgtttctctgtacgaatatggtacaatgctttttccaacgtcaaattgttcttggcggtaatttcttttcttctcggtatttctgggatagtagcgtctgtccatgtcgtcggcagtgtttcttccgccttgtccttccacttgtctatccaagcttgaggcacatggtcgtttgcgaatgcggtttgcccgctcatttccaaccaaatcaatgcccatgcccgtgggacaactcgccatttgtcatagcctccgccgccgacagcaacccattttccgccgcaatacgtatgagctagctggtgggcgagccgtggaatttcgcggtacacgttcattgatacatgcaaatgcgataaagggtcgagataatgggcgtcggccccgttttgtgtaacgataatgtcaggtttgaaaaagtcggcgacttctgtaaaagccgactggtagacgtctaaaaaagattcatcttctgtaaacgcatcaagtgggacattgatggaaaagccatagcctttgcctgaccctttttctgtcacgtggccagttcctggaaacaaatagcgccctgtctcgtgcaaacttagcgtacatacatctgggtcgtcgtaaaaggcccattggacgccgtccccgtggtgagcatccgtatcgacataaaggatccgcacaccatattttcgccgcatgtactcgatcgcaatcgaagaatcattgtaaatgcaaaaaccggacgctcgtccgcgaaagccatggtgaaggccaccgcctaagtggaaggcatgcaagtagccatcggctaaaactgcgtcacaagcccggagtgttccgccaactaaatgggcagccgcttcgtgcatatggggaaaaaggggcgtgtcttccgtttttagcccgtatgcttctgctgcgctatctggtaaccgtccttcgccgcctgcaatgactgcttcaataaaacgcggatcatgaatcagctccaattctgtttttgtagctgcgctaggttgaatgagtggctggttttgcaccgcccccaactcttccaagagagagtatgtcaactcgagacgaaggggatgaaatgggtgtgtttcgttaaatttatacggatattgacttggtccatatacaaggacagcttctttgttattcattggaacctcccagtgcgggaaacagcggattatagacttcatatcctgccaattgcagtgccgcaataatacgccgtggatcaatcgtttggacacgaaatgagagcatatatttttctgcttttttgctcggataagcgacagcgctaacaatattaatacgctcttttttaaaaacggcggcgacatctgccaactgcccagggcggttgtgtacacacacttcgataatggagctcggctgatctgcgccgaggagtttggttaaactataaagcatatcagactctgtgatcagtcctaccaatcgatcattgtccacaactgggagacagccgacgcgattctggaaaaacaggcgtgcaacttcttggacgtcatcatcaggatgagcggttaacacaggagtactcattattttcgtaaccggttgcaaaaaatcagttgcttctttggttacggaaagggtagaaggccgtatatcacgaatatcccggtcagacacaatgccaacgacagctgtgtgaccgttcgtaataggaatatgacgaatggaagcgctttccattagggcaatcgcatcttcaattgtgtcagtgtttgttagtgttggcacattcgtgcgcataattgttttgattttcattggcaaacctcctttctagtacataaagcggtttacaaagcggagctggtcgaatttttcaatcgagttctggtcaacattctttccaattcgcgccattaagcagtttgccggatgggaactaatttctggatcgtcggttgcataccaaatgagcccaccagcgttcatcattttttccatcacttttcggtattcccagacgtcgagtccgcttccttttaaatcccaatgccagtaatactctgttgtaataataatatagttttccatggcttcatctttcattgataagcgcaacagctgtttgccgatcccaagcgcccggtatggaggcgcaatttcaatcgcaccgagttcgagcaagttttccatattgccttctgaccatcgttccagagggtcaggataaacaaatgtcacatagccaacgatcattgagccatcgcggacgacgttaatacgcccttctggcaattcggcaatttctaaaagcgcttttttttgttcagtcgctggcctgaaggaagttaaaccttcatgaaaatcataaccggcaagttcgttagctggaagagggccctctaaaaccaattccttgcctgcaatcgaatatggttcgcggatcagtgtttttggatgctccattgcttcacctcggttagacaatctatgctttcattatacattgtagaaacgaaaacaagaaggttgcgaacgaaaatcgacgaatttatgaaaataaatggaacaaagagtgaattttgtttgaaaacgttaccttgtttatactataatgaacttaatttgagagtgagaggtgtgaacctgttatgaaagcgcttcctgctattgaaggaaaccataacctgaaaaattatgaagaagctgtacaaaactttgactgggaggatgtcagaaaaacgttttcctggcataaaacaggcaaagtcaaccttgcctatgaagcgattgattatcatgccgagaacggcaaaggcgaacaggttgctctttattatagcgatgcgcgccgtgatgaatcctatacatttgcggaaatgaagacgttctcaaacaaagcagcgaatgtgctaaaagaagccaacgttaaaaaaggcgaccgtgtctttatttttatgccacgcacacctgagctgtattttacgcttcttggcgccataaaaataggggcgattgttggcccgttgtttgaagcttttatggaaggggctgtgcgtgaccgtcttgaagacagtggcgcaaaagtgcttatcacaacaccgacattactagaacgggtgccgtttgatgatttgcctgatttagaaacggtgctagtcgctgatgaaacgtatgaagacaatggcccttttttacagttaaacaagcggcttcaggcagcaccaagtgatgttgcaattgaatgggtagatcgggaagacgggctcattctccattatacgtctggctcaacgggcaagccaaaaggggttcttcatgttcatgaggcgatggtccaacattaccacacggccaaagtcgtcctcgacttgcagccagatgacatttactggtgcacggccgaccctggctgggtaacgggaacgtcttacggtatttttgcgccttggcttgcaggggtaaccaatgtggtgcgcggcggccgcttctcaccgactgattggtatgagacgattcagcgctacaaagtaacagtttggtacagcgcgccaaccgcatttcgtatgttgatgagcgcaggcgacgaacttgttaaacaatatgatctctcgtcactgcgtcatgtcttaagcgttggcgaaccgctcaatcctgaagtggtgcgctggggagtgaaagtctttgacaaacgcattcatgacacgtggtggatgacggaaacaggagcgcaaatgatctgtaactacccggcaatggaaattcgaccaggatcaatgggcaaaccgattccaggcgtcgaggccgccatcattgatgatagaggcaatgaactgccaccgaaccgaatgggcaatcttgccattaaaaaaggctggccagcgatgatgcgtgccatttggaacaatgaagccaaataccaaagctattttgagcttgacggctggtatgtgtctggcgattctgcttatatggatgaagatggttacttttggttccaaggtcggattgacgatgtcattatgaccgcaggtgagcgtgttggtccatttgaggtggaaagcaaactggttgaacacccagccgttgcggaagcaggggtcattggcaaacctgaccctgtccgtggagaaattatcaaagcatttattgcactgcgccaaggctatgaagtcactgacgaattaaaagaagagattcgccaatttgtaaagacaggactcgcagctcatgcagcaccgcgggaaatggaattccgcaagtcattgccaaaaacgcgcagcggaaaaattatgcgccgcgtattaaaagcgtgggaattggatttgccgacaggcgacttatcgacaatggaagattaacgcaaagaagcgtgcctctacctttagaggcacgcttctttaatcgtcatcatcttctttttcattagatggttgagcattcggtttaaagttcgcttgaaacggggctagcccctcgatatgatcgatcatgtcgcttctgtataggtcggtagtgactaagccttgttcttcgcatgcttttgttggtgggccgcctgttaagccacagactcgtttttcgacaatgccatcaggctgctcaaagcgtttgccttctgctgtcattagatccgggtcaacaccataagcagcattagcaagattggcccaaatggactgtgtccgcgcccctgtgccgagcccgccaacgcgtttgcgtaaactaattgttttgtcaccgctataaccattccatacgcctaatgtcacctcagggttgacggcaataaaccatgaatcatagtctctgttggtcgtgcctgtttttccagcccagtcggcttgaaactgcaacttgttggctgctgtgcggccagtgccatttgcgctgtacatcacatcacgcatcatatcggcgaccaaatagtttgtttgtgggctaaacattgtatgcttactagcaggatgctcataaatgacttcgccggaatccgtttcgatccgttcgatcatatagggttccatccggacgccattgttgccgaaagcgctaaaggcgctgacattttgttcaacggtaacattgccgccaccgatagcgactgcttcattcacgccgtgcatgtctggattaaagccggctgcgtcgcggagttttacttttaagtcatcagggacatgccaccacgcctctacagcgggcacgttgcgtgattgtgccagtgattcccgcacagtgagattgcctttgtgagcgtggtcaaagtttctaatttccctcccaccagctttgtaaaacgcttgttcatcaggaatgacaagccctggttgggttactcctgcttcaatcgcgcccgcataagcaagaacaggtttgctcgtcgagcctgcttggcgataagcacgtgtagcgtggttatacagatgatctaagctttcttcacgaccaccgacaaagctaaggatttttccagttttattttcgattaaaacagagccgacttcttcccgttgcccttgtttgtcggcaccaaaatacgcgtcagattgttgagctgcctcgttcatggcatcatacaaatctttatcaatggtcgtaatgatgttgtaaccaccattgataatcgcgttttcgacttccgctttaaactgattgcgttcaacttgtttagcagtgtcgcttaatttctcccaaccatcgcggttatcgattttttgttgtacgagcactgccgttgcccggttcataatttcttcagtaagccgcggccgttcttccattgggtcaggcgcgcttgttgtaaaatcagcagtaaggtcgtagtcttttgcatcctcgtattgctcttttgtgatgtactctttttcgtacatgcggcttaaaaccgtttggtaacggttcaacccaggctgcaaaccgtcttgatctttaagctgttggtcgtttgtaaaaggcgtgtagccatacgggctttgcggcaagccagctaagtaagctgcttgtggcaagtttaactcgcttgccgaaacaccaaagaccccttgtgctgccgcttcaatgccagcaacatttcggcccgaggcattccggccaaacggaacgacgtttaagtaggcttccaatatttcatcttttgtcataaactgttcgagcctaagcgcgagcataatttctgttgctttgcggtcgaacgatacttcatcggataaaatttgttgctttattaattgttgtgtcaatgtgctgccgcctgtctgaacagacgaactagtcagctcttgcatcgttgcccgtagcaacgcttttgggacgatgccattatgctcgtaaaaatgttcgtcttctgtagcaatgatcgcccattttacttcatcggccacgtcatcaagggagacaatttcccggtctacttcactgcggatttttcctaagtaaacgccgccagcaaggtaaatgtcgcttgtttttgagagcgagcctacgaatgtgcgcatgtcttcttctgaatatgttttttcatcgactacgagggaagcaaagtaacctgcggcggttccgctagcgaacataaatcctaaaaagccaataatgaataaattccataatacttggtatgtaatgccgactttccggaagaactgaatgtcatctagctttgctataaaggcatcccagttgttcttccacttcgaaagaaagtgcttcatcgactccccccttagtcgtcttagtatatcataaattgcgtgatgcgcatacgtgtgttcgctatgttgacagtgtacacaccgtatggtaaaactagaaagtgaattgaaaacgtaaaaaagcgaggaaaggccgaagtatgggcgtacgctgctcgaagagagccggtggttggtgcgaaccggtacacgtacgttagccagaattacagcctggagctattctttgtttcggcaaagaacggagaagccgttatcgaatgagtgggaggcacgaatgccttcaacaagggtggtaccgcgacaagttcgtcccttatggggaggggctttttttgcgttgaattgaaggaggaacgatagatggatgaaaaacaaccgttaacccctgagcagcaaaagctcgttgatgagcaagtggaagcgcttatgcgaggagttgtagaagtcgtcccgaaagaggcatttcgggaaaaaattgagaaaagcgttcgaacaggaaagccgttaaacattaagcttggcatggacccgtcagcacctgatgtccatatcggccatacagttgtactgcaaaaactgcgtcaatttcaagagtacggccaccatattcaactgctaattggtgattttactggaaaaatcggtgatccgactggaaagtcagagacgaggaaagtgttgactgatgaacaagtcaagcagaatgcacaaacatacgtagaacaatacggaaaaattttggacattgaaaaaacagaaattctttacaactctcgatggctaagcgagctgaaatttgatgatgttttaaagcttgctggtcagatgacagtggcccgtatgcttgaacgggaagactttagcaaacgctataaaaccgggcaaccgatttcggttcatgaattcttttacccgcttatgcaaggctacgattcggtcgcaatggaaaccgacatcgaagtaggggggacggaccaaacgtttaatttgttaatgggacgccaactccaagaagcgtacggaaaagaaaagcaagtgatgctgacgctgccgttaattgaagggctcgacggcgtccgcaaaatgtcaaagtcgcttaataactacattggcattgacgaagcaccaaacgagatttttgggaaggcgatgtcgatacctgatgaattgatggtaaaatactacaaattggcgacggatgtgccgatggatgaaatcgaagctttagaaaaagggcttgcagatggcagtgtccaccctcgcgatgcaaaaatgcgacttggccataaatttgtagaaatgtaccatggcaaggaagcggctgatgaggcagagcaatattttaaaacggttttccaaaaacgggcgctgccagaagacattccggtcttttcctgggaaggcgacaaagaagtgccgttaattgatttgcttgttacgttaaacatgcagtcttcaaaaggcgaagcacgccggatgattcaaggtggcggcgtgaaaattaacgaacagaaaatcaccgatattcatacggtcgtatcggttgaagataatatgatcgttcaagtcggaaagcgcaagtttgccaagctgagcttaacataaggaataaaaaaaccagccatttaaggctggtttttttattcttaacgagaataccactcaacgataagcgcttcagtaatttctgctggaagctcagaacgctctgggtaacgtgtgtacgtaccttcaagcttttcttcgtcaaatgatacgtatcctggcgtgaaatcatttacatcaagtgcttctttaacaacagtcaaattccgtgaacgctcacgaaggccaattgtttgccctggctttacgcgataagatgggatgtcaacgcgtgaaccgtcaacaagcacgtggccatggtttactagttggcgcgcagcacggcgtgtacgggcaagacccatacggtagacaaggttgtctaagcgtgactcaagcaaaatcatgaagttttcgccgtggatgccgttcattttgccagcatcgttgaacgtgcgcaagaattggcgctcgtttacaccatacatgtgacgaagtttttgcttttcatgaagttgaagcgcgtattctgaaagctttttacgttggtttggaccgtgttggcctggagcgtaaggacgcttcgcaagctctttccctgttccgcttagagaaacgccaaggcggcgggatagtttccaagatggacctgtataacgagacattgtgtctcctccttgttattttggtgttgcaaaataacaacctaaatgacaatctctaaactccagccattccattttcatgcaccttcgcttcgacagctaaaagttacgcgatgcacctcaatcattgcagccgcttgaggaatggattggtcaaaagttcgtttgtcttggctgtcactcacaccgatctatcatagcggaaaagcgcctacttgtcaatgtttgattaaaaaaggttccactcgcttcagtaaacgttcaagcgcttccgcttctttttcgtggaagcggcctttgctcgggctgtcaatatcaagaactgctatcacgttctgttcgtggcggatcggaataacgagttcggcgtttgaagcggcgtcgcaggcgatatgcccagggaatgcatgaacatcatcaatgcgcatcgttttgttttcggccacggcggttccgcagacacctttgccaattgcaatccgtgtacaggcgggcagtccttggaatgggccgagcacaagttcgttttctttaagaaaataaaagccgacccagttaatgtcatctaaaaactggcccaacaatgcacataaattggcgtaattggctagcgcatccggctcatcttcaagtaaggcaacagcttgctgttccaaaaggcgataggctgcttcttgttcggtaggataatcaagtttactaaacatcgggtcatgctccttccatttgtcaaaaaccgcagcgattcaacaaaagcatgcgggatttgtcaaaaagtttttgcgtaaaagccgcttaatcagacaggaagcgggtaataaaaaacgaatactgtttataagataacacgatttgcggctgcttgctttaacatatttccgaaagaagtctccttctttaagcgtgtagggcgtagccgggcggtaaggggagatgactatcggttggtttcaataacttcatccggaaaatattctatttcgattcttacagagtatgaaaaagaaattaaagacaaagacattcaaaacgttgtaggattagactttgcgatggatgggctgtttgttgatagcgacgggaagaaagccaattacctaagttttatcgacaaatgctggatcgattagcaaaagaacaacgcaaactatcccgcaagaaaaaaggttcttcgaattggcacaacccttgaagtttggcaaaagtgtcgctgataatagatggggaatggtcacttctttcttacagtacaaactaacgagcaaggaaaaaaactgatcaaaatcgataaatggtttccatccacaaagacttgttcgcaatgtggctccataaaagaaataccattatccgcatgtacgtatcaatgtacttgtggactaactcttgatagagactacaactctgcgctgaacatcaaaaaagaaggaattcgcttatagccactgcctcatgaatcaatcaactcttggaacaagagggttagcttggtccatttcgtcagctaccaaaaggggcgattacccaagaagcccccacttcaagcgacctgcaagggtgataagtggtgggtagttcacaaccaacttggagggatacgaatgagcgaacagacgaaaacgacgattaaagatgcagctatttccttgttctacgcaaaaggcttccacggtacatccgttcgcgacattgccagaaaagctggtgtgaatccagcactgatctcctattattttggcggaaagcaggctttgtttgaatcgctattaattgatttttttgaagggtatgtaaaaacgatggaaacagccgcacgggaaccaaacggcgatcccatcgattctttagtagagctgtttaaaaaagtgctgctttaccagcaatcgtgtcattggctagcgcgtatggcacaccgggaaatgacgctagactcgacccttgtacgggaagtgatgagcacctatttgcggaaggagcaacatttgcttgaacaagcagtcgcccggtgcttacgcaggcaaggggagccattagctgctgatttaattgttgtccagcttcgcaatatgatgacattgcctttttcttcaccgcaatacttgcgtgaactctttttgcttactccggcagatgagcagttcatcgagcggtatggacggcatgccgatgaatggattcgctctttgcttagctcattggagcagaggaaaacaatggtggttcgcctgacatcgtaaagcttaaaacatgcggagacctgcggcagaatgggcgtctgaaccataaacaagggggatgcccatcgtttttgcttgcagtgcaatttcttttggtggataggactctccacaataaggcttggttagacctgcatagttataatcaagctgaagcccgttttcatggatggcggcaaggatggcgctgatctcttgtccaaacgattgctcagcctgatagagcttttgaaattttttgcatagcgttatatggccgatccgctttggtttataggggccgagatcagcacaaatcgaagctaaaaccgtgtcgtaataaagggcatataaggcgttcgtgctgccaagatccgctgcgattgccgcaaactcttctgggctgtaatcgatgcagcggtaatggccgcctactttcaaaaaatggacagatagaatgctgtcatcaagggaagggccaacctcgtttaacagcgcttttgtttctgcttcgtagccgaatatataatcaacctctaaaccaatgaggacgtccagtgcgtgggcgtactctttttttattgcacgcgtttcctgcaaataggcatttaagtctgaagctgccatggcgctgtcttggttcggtgtaggatcgctaaaaccggcgggaagaggggcgtgttcagcaaatgtaatcgtctttaggccaagtgaaatcgcttgttcacagtaagatgccagcgtatccgctgaaccatgggggcaaaagggtgtgtggatatgcccgtctcggataatcatggaaacagctcctttataaataaggtcgtgtttgaagatatttgtcgaacggcagtgtcgggaatctgcacacaaattgtcgcattcatggtattatattacgtatcagaatagggataaagcaatgtttttataacttaacggcaacgtttacgattagtttggataaaccgattaaaaaacaggtaaaagaaaagcgcagtagaggggagttccatgtggatatttttgtaacagtcatcattatagtgctcgtcctttttatagcagggacggcagctgggatttttctcagacggcatatacataaagcagtggacgagctcgatgccaggaaaatcaatttattgaatcgcgacattccagaggaaattgccaaagtaaagaagctccgcatgtcaggtgaaacggaacagaaatttgaaatgtggcgcaaagactgggatgagattgtcgaatcgattttgcctagcattgagaaccaattaattgaaattgaagaatgggccgcaaaataccgatttaaaaaagcaaaagatgcgattggctgggtaggaaatcgaattacgacagtggaacagcagttggatacgatggtggaagaaatcgatcacttggtttccgctgaagcgaaaaaccgccaagaaattagcgaagtccgtggcaaataccaagagctgtcaaatgagctgttaacaaaacggggatcctttggcgaggccgtgagagcccttgatgaagcaatggccgatataaagcagacgcttgcatcctacgatgaagcgactgaaaatggcagctatctccaagcgcggaaacagcttttaatgatgaaagatcgtttgcatgacttaagggaaacaatgaatgagattccgcagttgctcatccaagtaaaatcaaccgttccagctgatgtacgcaacttggagatgggcattgcccaaatggaggaaagcggcttccatttaaaaacattcgcttttgatgtgcgccttacacaatttaaaaaagacattgataaggcgtacgagcaacttctcaaccttcacgtcaaagaagcaagcgaattgttgcaaacgattaacgacgagaaggagcaaatgtacgaaacgcttgaagcagaagtgactaccaaaaataagctaatggagaaaattccaacactaaaggaacaggtgcaggcagcaacagaacgattgcaaacgttgttgcgtgaaacgactcatgtacaaaaaagctatttaattgctgaagaagaaacccatttgcaaaatgcgttgcaaaaagaccttgccaacttgcggaaccaattgcatgtcattgtcgatgtaaccgaaaaccaaaaacaaacgtactcttccatttacgaaatggctgagaaatggtcaaaagagatggacacgttcaaagccaatattgataacagcattgaacggcttcgtcgccttcgaaaagacgagttaaaagcgcaagaaaccgtctcacggcttcgtagtgtcatgtacgaaacgaaacggacgttgaaaaaaagcaacttgccaggggtgccagtaaagcaactggaagcccttgactttgccgaaacgaaagtaaagcaagctgccgatgcgctaaatgaaatcccccttgaaatggaacgagtcgagcaattggtacacgaggcgattgagcaagttgaaaaaggttcagacgcaatagaagaaatggttgaaaaagctagactcgccgaactggctatccagtttagcaaccgatatcgaaaccgtggtgaagaagtgcggcaagcacttgaccaagcagaagacgcgtttcgcagttttcattatgaggaagcacttgagcgagtccaacatgctgttgagccatatgaaccaaacttgttggaaaaagtcgaaaggcatataagtgcatagtgcctttgccgtgcaaggcgaacgcccaacacgtactatttatccagagttaccagatgctaggcgaggaagatggggaacgtcaaataagtgcatggtttctggacgtataaaaacgacgataaccacgaaccgacgacgtatgtgaacgcagtttcctttgtgaaactgcgtttttgagttgcggtgcagattgttgaaagatatgcttgcaatagcgaacgaggcttgctaagttaaaagcctggaagagaggaaaggagttacaccggatgatttatttggacaatagcgcaaccactcggccccatcccgacgtgcttgttttatatacgaagatggctgcagattattttggcaatgcttcgtcgttgcatactcttggcatggaagcggagcaagtacttgatcatgcccgtaaacgttttgctgcttatcttaactgcatgccgaatcagcttatttttacctcagggggcacagaagcaaatgcggtggccattcaaggaacagcgaaaaagcatgcaaacggccacttaattaccaccactgttgaacatgcatctatttatgagaatgctcgcgctcttgaagcgcaagggtttgaagtgacgtatgtgcaagcggacgaggatggacgtgtgacaagcaaagcgattgaatctgccattcgtccaaataccgttttggttacgcttgggcatgtccaaggcgaactagggactatccaaccgatcgctgaaattggcgctttgcttcaacgctacccacaaatcaaatttcatgtcgatgccgtgcaaagtttggcaaaagtcccattttcgctgaaagaagcaaacattgatatgctgtctttatccgcccataaaatccatggtttgaaagggacagggttgttatttgtcaacaatcctgctactctggaaagtctcctttacggaggcggacaagaacaacgattgcgtcctggcacagaaaatacagcaggtgtcgctgcatttgccaaggcgctcgggttaatggaaagtcaggaacaggaacagcaacaacggctgcttgccttaaatgacatgttgcgcgccaagctggaacaaatagaggggctagtcgttaacacgccaacatcgggctatgcacctcatatactgaatgtatcgattccaggcattaaggccgaagtacttgtgcaggcactcggtcaacgccaaatttacgtttcgacacagtcagcctgctcgacgaaaacgggcaaaccgagccgtgtccttttaggggcaatgaaaccgagaacagtggctgagagcgccattcgcatgagcttctcgtttgcaacgacacatgaagaagtggaagcatgtgcagacgccttaaaacagatcattccagagcttcaggaggttgtagggaaatgaaaatggaccatattcttgttcgttatggcgaattggccttaaaaggaaaaaacagaggccattttgaaaaactactgctcgccaatattcgccatgtattaaaaccttttccaaaggtacaagcgaagcggacgtttgggcggattgtcgtcgaactaaacagcaccgaccatgagcccgttgcagcagcactagccaatgtatttggcattcaatcatacagcctcgccttaagagtggagaatgagttagaagccatgcaaaaaggcgcactctttatgcttactcaacatccagatgctaaaacgtttaaagtctctgctaggcgggcatacaagctttttccgattgattcccagtcccttaaccacaaaataggctcatacgtgctaaaggcattcactggcgagttagctgttgatgtccatcatcccgatgtcaacgttgtagtcgatgtgcgagagtcaggaacgtatataacagctggtgtgtatgcaggagcaaaaggattgccggtaggaagcagtggaaaagttcttcatttgctgtcaggcggaatcgattcgcctgttgccgcccatatgctaatgggcagaggagcagaagtagaaatgcttcatttccacagtcctccttatacaaatgaacgggccaaacaaaaagtgattgatttgacaagagagttgacaaaatttggtcgtacgatcacgcttcattttgtccccttcaccgatattcaaacgcatatccataaagaagtgccgtccagttatgaaatgacgattatgagacggatgatgttgcggattgcggatcggatcgccagggaacgaggcatcttagcgatttcaaatggtgaaagtttaggccaagtcgcctcgcaaacactggccagcatgaatacgattaatgaaatgaccaatttacctgtattgcgtccgcttttagcaatggataaagagacgacaatcgcttatgcgaaacggattggcacgtatgaaacatcgattctcccttatgaagactgttgtacgatctttttgccgacagattctaaaacaaagccaaaacgggatcgttctgctcattttgaacaatacgtgcaagtggaggaaaaatgcagagaggcgattgcgggaattgaatcccttgaagtaacaggcgcgcacacatcgccaacattggaccagttattttaaaaggaaatgatgggaatcccctacttcttgcgaaatggaagtaggggaagttcatatatttaccagttatcaagcatgtatgttctttcctctttcgagcaatctagaagtaccggaggaggtgagacatatggctaactcaaactcaaataacttggtagtacctggcgtacaacaagcacttgatcaaatgaaatacgaaatcgcttctgaatttggcgtaaaccttggagctgacacgacttctcgtgcaaacggttctgtaggtggcgaaatcacgaaacgtttggttgctcaagctgaacaacaattaggcggatttcaaagataagttcatacaaaatggctaggagcagggacacccctgctccgtttctgtgtttttcaacgatatgggaagatgatatactagaaagaggcagaaaggggcttttgtggtaaccgcacgttgtatacggaagcaagaaaggactctaggctgcgtggcgaacggagaaacaacgatacataaagatgataatgggcaatgggggagctacgaacatttgtaggagatggcggagcatttgattttaagacaaaattacaaaggagcgagaggatgaaagcgagaaggtggattgcattaggaattggggcttttattttggtgttttcagtcattacatcgctatcactagcgatgaatacatattcccaagccaattggctagcaggagcttatgacgaaagcgtagtgattcaggaaggagatccttccggttcaattgcccttttagaagtaaacggggcgatcattaatacaacaagcgattctctgttttctgctgaagggtacaatcattcaaactttatggatttattttaccaaacaatgagttccccaaatgtggaagggattattattgcggttgattctcctggtggcggcgtattagaaagtgcggaaattcatgatgcggtcattgaagcacaagaaaattatgggaaacccgtttacatttcaatgggttcgatggctgcttctggtgggtattacttggccgctcctgctgagcaaatttttgcatatccgcaaacgttaacggggtcaattggcgtgattatgagttcgttaaacattaccgaattgcttgataaaatcggtgtcgaggaaacggtttacaaaagcggtccttacaaagacatgatgagcggcactcgtccgcctactgaagaagaagatgagattttacaatcgattgtcgatgaatactacgatgaatttgtcgaagtcattgccaatggccggggaatggatgaagagcgcgttcgtgaattaggggacggcagaatttatacaggcaggcaagcgctcgaagcaggcttaattgatgagcttgggtcgatcaatgatgtcattgccgccatgcagcgtgatttgggcagcaactaccaagtcattgcgattgagccgaaacaaggattaacgagtatgtttggccttgctgctgaaaaaatatttggcaaagctgaacaaaaacaaggactcatggaactgaccgagtacaaccaacctagagccatgtatctgtatgattatgaataagggggctgaacaaatggaaaggcgattcccctctgccggattcaagcgttatttacgaaaacagccgccggtgatggttcctgcaacaagggaggcggctcaagaaaaaggggcaagcgcgattcgttatgctgggttttggatgcgattatgggcgtttttatttgatttattgatcgtttcagctataaacgcggcattagttcattcgtggctgccgtttgtacaaacaaacgaccatttctttgggtttgcggttacaacggtgattgccccagctattctttacgcactgttgtttttcgcttattttgcaggaatgacaaaagctttctcgcaaacgcttggaaaaatggtgtttggtttaaaagtggttgctgcagacggctcgccgctcacatggcgaacattgttctttcgagaaggcgtcggccgctttatccagcaagcacccttaccacttcgtttcccgctgcttgcttatattgttgttgcatgcacgcctaaaaaacaaggcatccatgatttgtttgccgagacatatgtcatccattgtgagtagcaagaacaatggtgaaaacggagcctgtcgtctaattttgacgacaggctttaggtttatggacaaggaaaccgcagcgctccaacccccgttccattcgattttccctcgtctgccaagcgttttttaactgtcagagtacgattatcgactttgtcttttttagataacgaccgtttgtttattttttcggcaattgcgtatagtaaagagaaaggagggcaacggtgtgcaaagctgggtatggtggttaatagcgtccacagctagtctgctgctactaggcatatgccttttaatggcaacaattcgcattcggtgtacttacaaacatcgacaaaaggaagatttgctgcaactggatgtccgcatgttaggctttactctttatcaattggaagcgcctttaattgaatggaatgaaaacgaaggcacggtgtcgatcagggaaaaaaataaaagccctgtaaaagaaaacaaacaaaaaaagaaatggtcgattgaaacaatcaagcgctttattaagaaaagcaaagagtggattgcacactttcccagctataaacggatcgctgttcgtttttttaaaggcttgactgttgaagagttcaaatggtccactgaaattggcacaggagaagccgccagcgctgccaaagtggcgggggtcgtatgggggctaaagtcgtttttttgcggatgggcttcccataaagtgaaatggcgtgctgcccaacaattggacgtcgttccccatttccagtctgaaacgttcgccctttcgttttcatgcatagtctcctttcgcgtgggacacgctatacgtacaggtcttgcgcttgttctcaattacaagaagaactcttcacagaaggtacaggcgcctgcacaaggtgctgtagcaagtgattgagtgaaaggagtaaagtcatgtcagaacatccaattcagggcttgatgaagacagcaatggaaaacatcaaggccatggctgacgtcaataccattgtcggtgaccctgtcgaaacacctgatggcagtgtcattatgccgatttcaaaggtaggcttcgggtttgctgcagggggaagtgaattccacatcgagcaagctcacgatgaaattggccatccatttggcggtggaagcggcggcggtgtgtcgattacgccaattgcctttttggtcgtaaatagcaaaggtgtcaatatggttcatttagacagttcgactcatctttatgaacgactgctcgacttggcgccgcaagcttttgaaaaagtacaacacatgctaaagcagaacgagcatggtgacaaaactagctatcattatgacgatccccttgcataattggttcaacaagctctaagccagttgagatcttctcaactggcttttcggcgatgtgcagattttatgatgcttccaattcggcatcggccatgcattttacccctaagttgtttaatttgcgatgatgcaacacgcgataggctacgatggccagaatcacaattgaggctgagatgatgtacataaacgaataggtagagcctgtgacaatgaggccaagcacgtaagagccgaggccgataccaaggtcataaaaaatataaaaagtgcttgtcgcttgcactgcttgttttgggggaacagattgaacggcaagcgtttggaaacttggcagcacagagccgaaaccggcacccattaagacagcggcgattaaaaaaatcgataagctgcctgcttgcgaaagggtaaagaggccgatcgcaaataaaacaagtgttgggtagacaacgacattttcaccaaagcggtcaaaaatcctgcccgtaatcatacgggaacctaggaggacaagggcatacacaagaaaaaaagcacttgctgcggattccatgccgaggctgacagcgtacaacgtaataaaacttaatatcccaccgtaagcaaaggaggcaagggatgagcaaaggctgacaggcaccgcttttatggcaataaaccgatctacagaaagaggttctggtgcttttcttacaggcttatacacgataaacaatgcaagcaatagccctataacggataaaaatacggtcgttagaaaaagtgctgtgtaggaaatgtgttggacgacttgcaatccaacgacagggccgatgaccatagccaggctcataaacatgctgtagtatccgactgcttctccttgccgtgttttaggggcaatcatgatcgctagcgcacctgctgctgttgtcgctactccaaagcccaaaccttgtaaaaaacgcaaaaaaagaagccatccgaatgaaaatgaccaaatgtgcaaaatggcggtgatcactacgacgagaaaggaaacgagcaacatgttcttctctccgaaacgatcaagcaatagccctgcgaaaaggcgggcaatgactgaggcagcgatgaacactccaacgataatgccgacttgttgttctgacgcatgaagcacgtccatcgcaaataacggcaatgtaggaatgaataagttgaaaatcgaaaataaagtaaatgcgctaaagcataaatacaaaaacgtaggcgaccaaagccgctgcttagccatggagtcacatcctttaattgtttggcacacgaaataattatatacgtttatagtgtagagcgaatggcagaaacagtcaatgggaaaggcatcctttttgtgccaatcaatgttcacgattaaaacgtcgcagttgcctaacgactgcttagcctgtacaatttataaagaaagaaccaatatgatggggggaagggaagcatgcaaattacattcaagcaaaaaccagtcacattagctggaacacaagtccaagtaggggaaaaagcgccggattttacggtgttggccaacgatttatctgaagtaacgctcgcagattcaaaaggaaaagttcgcttgatcagtgttgtgccatccttggacacaggtgtatgcgaccagcagacaaggcgttttaatgaagaggcagcaaaattggataatacggcggttcttacgatcagcgtcgatttgccatttgcccaaaaacgttggtgcgcttccgctggcattgataatgtccaaacgctttccgaccaccgcgacttgtcatttggcgaagcatacggtgtagtaattaaagaattgcgcttgttggcccgttctgtctttgtcgttaatgcggatgatgagattgtttatgtggagtacgtgaacgaagtgacggagcacccaaattatgaggctgcgttggaagcagctaaaaatgcttaatagccgaacggcataatcagtttatgtccactgctgtgacagtggactttttctttgtgcttttgtacaatacaggacagacaagatggacggaaaaaagaaggtgtaaaaatggaatcaactcaagtagtacgtctgtttgattatttggaccaaagcgctgacattttacttaaccagatcgagggaacgtatttagacgctttggctgcagcaggcgacaatttatttgaacaacagattttgcaggaagtgcgtggcgaaaccgaggcaatgctcgaaaaaaagctaaacgaagtgaaagacgaaaaatgggaacgggaagatatgcgcaaagcatttcagcttgccatcataaaaggaatgaaagggaccgtacaagcaaaccacatgctgacgcctgacgcggtaagtttgtttatcggctatctggttcaaaaactaatagaccctaaaaaagagcgctttaaactgcttgatttggctgttggttcagggaatttgttgttttcgatttgcaaccatgtaaacaatgagccagaggcaattggatttgaagcggatgaaacattgctgaaagtcgcgttcgcaagtgccaatttgcagcaacgtgaagtcgctttataccaccaagacagcgtccaagttacattgcctcacgcagacatcgtggcgagcgacttgcctgttggctattatccaaaagatgatgtcgcaaaagggtttgagttaaaagcaggagaagggcatagctatattcatcatttaatgatcgaacaagcaattcgctcccttcatcccggcgggtatgcagtgttgcttgtcccaaattttttattctcaagcgatcaagcagaagcattaaatgtttacttgaaaaaagaagcaattgtgttagggcttctccagcttccaagttcgctgttttccaacagtcaacacggcaaaagtatactgttgttgcaaaaaaaggcagacaacgtcaaaacccctcaacaagcattgcttgcggagctgccgtctttttcaaacgctgaagcgatgcacgatatgatgaggcaaatcaataaatggttttcagaacagttagggcgctaaatgagcgctctttttttgttgaaattgccgctctttttaattaattcaaatgtatgcgcttttttgtcgaaccgtgcttgaaatcaaggctggtgaatgcttaaatggtagaggaacatgcgtgttagacagaaaaaaggagtcgaaagaaccatggctaaaattattgcaattaatgcaggaagttcatctctcaaatttcaactgttggcaatgccagaagagacagtcattgcaaaagggctggttgagcggattggcttaaaaaaaagtatttttacaatcgaagcaaacggccaacagcatgaattgaccgaagatattcctgaccatgctgcagcagtaaagcttttgctaaaggacttaacgggccgcggcatcattgcatccctagaagaaattgaaggcattggccaccgtgttgttcatggcggcgagaaattcaatgattccgttgtaattacagatgaagtccttcaaggcattgaggaagtatcagaattggctcccctccataaccctgccaacattacaggtattaaagcctttaaagaagtccttccaaatgtacctgctgtagcagtgttcgatactgctttccaccaaacgatgccagagagcgcatttttatatagtttgccctatgaatactatgagaaatatggcattcgtaaatatggattccacggcacttcccataaatatgtcacacatcgtgcagccgaattaatggagacgccaattgaagaattgcgtattctttcttgtcatttaggcaacggcgcaagcattgctgcggttaaaggcggcaagtcgattgatacatcgatgggcttcacgccactggcaggtgtgacaatggggacccgttcaggaaacattgaccctgccctgattccttacattatggaaaaaaccggccaatctgtagaagaagtcgtggctacgcttaataaaaagagcggcttgttagggataactggcttttcaagtgatttgcgtgatattgaagcggctgcgaaagaaggggacgaacgagcacaggtagctcttgatgtgtttgcgtctcggattcataagtatgtcggttcatatgcggcacggatgggcggactcgatgcgattgtctttactgctggcattggcgaaaatagcgccaccattcgggaacgtgttctaaaagggctcagctttatgggcgttgatgttgatttggaaaaaaataatgtccgcggcaaagaagcgtttattgaaaaagcgggcgctccagttaaaatcattgtcatcccaaccaacgaagaagtcatgattgctcgtgacacggttcggttaacatcataagataagttcgccttgccccctcggttaaaccagaggggggaggctgttttttttatctagtgtttcccatagaagttttgcctttctggaaagaagtagataagatagaagcggaggtgtctggcaatgacagtcaatggcttttatttaattcgtgaccgtgaaattaaacaggcagctaatggctcgctctacgccaatttcacactgctaaaacaacatacgattctgtctgcgaggctatgggatataacagacgaccaacaagataaatttgtgccaaaagcaattgtaaaaattgaagggaagctagaaacatttcgctctaaacaacaagtgacgatccaaaagattcgcttggctactgaagaagacggcatcaaccgcaccgaattggtatcgaaaaaagggatttccagagaggatttgtggcatgagctgcggatgatcatggaagaaatccaatcgccagttcttcaacttgttataaaaaagctttatggcgatcgatcaattcgcgaacgctttacaaccatccctgctgctaaaaaattgcatcatgcttattacgcaggcttgcttgagcagacggtagagttggccgctgcttgtttgcaacttcttcctttgtacgctgacttggacaaagacgtagcccttgccacttgtttgctcggcgacattggcaaagtaaaagcattggaagatccgtttgcccctgaatacacccgttctggtgagttaatcggccatttggcattaagttcagaaatgatcagccaagcggctaatgaacaggggttggacgtaaacgaccagaaattagtagcagtcaaacacgcgatattggcccaatatggcgaaacggagtcagggttgtccagtaccgttcaagcaaaaacaaaagaggcgcttttttattactatatcaagcggatgaatacagaattacgggcgttgcagcaagctgagggcggagaacacgactttgcctatctcgatttgtttaagcgaaagatggctgtcggaaaggcttttcatcaagaggaggaagctgagtgaagacggagattgccttaatgcatgatcgagtacgtaagtatgaaaaacagttatacgaacaagcgcaaagcccaatgacgacgcctgtccctttgcaaaaggcagggatgcggacattagctcagttagaaccgtttgttctccaattgcatccctttatcacaaaagatgaatggtttaatcagcgtgcaaaggaaacgtttacaccacttcccgttagcgcaagtgaacaacagatcactattcatgaacaaaagctaaatcgcgaggaagccaaaatacgacttttgtctgcaggcaaaggagcctatttagcgaaaggcaaaagaatggcattgactttgccagcgcaactgtatgcgtgtggacgcgcgattgctctaatcggccatgcttatggatataaaggagacacagcgcttgagtcgctgtatgcgattcgcctactccacttatcctttttgccgcgctatgcgcgcctcgctgaatgggaactcctgcaaaaggagctggctgagcatgaaaaaggccaacctttctatcaatcaagggaagatttattcagtgatgaattgcttgtgtctttggctttgcaatcgatgaaatgggggcttattcgttcagtaagcaataagcagattgctggcaaaagcttggcgacatctgcggtcggcgcttatagtttttacaagcaaatacagacaaccctcgctgctgcacgtgttttttaccaaaaaaggtggctaaattctagggagcgcatatactatacaaaaaccaggcgatgactcaatcaggcctggttatttatatagaatatttggcgaaaccccttgtcaaaagagaggaagcctgttaaagttatgtatattcattaatagaggcttattttcttgcaaatcgggaagaggttcccgactgttttttgaacatttatgtataaaaataacgaaaagagaatgattattcatagcggagggattcacatggcgaaagaaaaagtagttttagcttactctgggggattggatacgtctgttgccgttaaatggctaactgacaaagggtatgacgttatagctgtcggcctcgatgttggcgaaggaaaagatttggagtttgtaaaacaaaaagcccttcaagttggggccattcaatcttatacaattgacgcaaaaaaagagtatgctgaatcatttgtcttgcctgcgttgcaagcacatgccctttatgagcaaaagtatcctcttgtttcggcgttatcacgcccgctcatttccaaaaagctcgtagagattgccgaacagacgggagcaacagcagtagcccatggctgcacaggaaaaggcaacgatcaagtgcgctttgaagtttccattcaagcgttaaatccgaacttaaaagtattagcacctgtaagggaatgggcatggtcacgtgatgaagaaatcgagtatgcaaaagcgcacaatatcccgattccgattgatcttgacaacccatattcggttgaccagaacttgtggggacgtagcaatgagtgtggcgttcttgaagatccttgggcgactccgccagaaggagcctatgcgctgacagcgccgcttgagaaaacgcctgatacaccagacattattgaactgtcttttgaaaaaggggtgcccgttgcgattaacggagaggcataccctcttgatcagctgattttgacgttaaatgagatcgctggcaaacatggcgtaggccggattgaccatgttgagaaccgcctagttggcatcaaatctcgtgaagtttatgaatgcccaggagcgatgacgctaatcaaagctcacaaagagttggaagatttgacgctaccgaaagaattggcccactttaaaccggttatcgaaaagaaactgactgaactcatttatgaagggctttggttttcaagcttgcaaccagcacttcttgctttcttaaaagaatctcaaacgcatgtaactggtgttgtccgtgtcaaactttttaaaggccatgcgatcatcgaagggcgcaaatctgcttactctttgtacaatgaaaaactagccacgtacacgccagatgatgaatttgaccattcagctgcagttgggtttatttccctatggggcttgcctacaaaagtacacagcatggtgacaaaggagaaaaaggaggtcacgctgtgagcaagctgtggggtggaaggtttacaaaaacagcagaacaatgggtcgatgaatttggcgcatcgatcggttttgaccaacagcttgttgaggaagacattacaggaagcattgcccatgtcacgatgcttgccaaacaacacattctttctgaggaagaagcggcccagatcaaaaatgggctaaagacgctgcaaaaaaaagcagcagcaggagagcttgtcttttctgctgctcaagaggatatccatttaaatttagaaaagctgctcattgatgaaattggccctgttggcggtaaactgcatacaggaagaagccggaacgaccaagttgcgactgatatgcacctctatttgcggacgcaaaccgaagaaatcatggaagcaatccgcacattgcaggccgcattggttaagcaggcggaagggcatgtcgaaacgctgattcctggctatacccatttacagcgggcacagccggtttcgtttgcccatcatttgcttgcctacttttggatgctggaacgtgattacggccgattgcaagacagcttaaaacgggtgaacatttctccattaggggctggtgctttggcggggacgacatttccgatcgaccgtgcttacactgcggaactccttcattttgagggcatttacgaaaatagccttgatgccgtcagcgaccgcgattttattgttgaatttctcgctgcttcggcgacgctaatgatgcatttgtctcggttatgtgaagagttgatcctatggtctgcacaggaatttcaatttattgaaatcgacgatgcctttgcaactggatcaagcattatgccacaaaagaaaaacccggatatggctgaattgatccgcggcaaaaccggacgcgtgtacggcagtctgttcagcttgctgacaacgttgaaaggtttgccgctagcttacaacaaagacatgcaagaagacaaagaaggcatgtttgacactgtaaaaacagtcaaaggcagcttgcggattttcgcaggaatgattgaaacgatgactgtaaatacggatgcgatggcaaaagccgtcacaagtgacttttcaaatgcgactgagttggcagactatttggcgacaaaaggaatgccttttagagaagctcatgaagtagtaggcaaacttgtgctcacagcaattgaaaaaggtgtgtatttgcttgatttgcctatcgaagtttacaaagaggcgagcagcctgtttgccgatgacatctacgaagttctccagcccaaaaccgttgttggccgacggaatagcgcagggggcaccggtttcgagcaagtcaagctcgcccttggaaaagcaaacgatcttttgtctcagtctataaaaggatagtatgtgcaggctaaagtcagctaagcaagatccgaagccgagtaaagatgtaagagggagcattgatgcttcctcttttttatttttttgtgaaaagggggtagaaaataaatacaggaggcaaactaaggagcaatgaaaaaggaggagtgggacaatggaaaaaaagcaagaaaccaatggcgaacacattgagtctggcgagcagatggtaaatgaacaaattatggattcctattaccaagggacagcagaggacgaaaagcgtcgcagcaaatgacgtcctgatctcgatcggatgacacaaacgcaaaacaaaacccaggctgattagtagttagcactgggttttgttttgcgtttccaatgggactcatgtatctttgggataaaagcgtctagtcaagaggtgaacagcaatgaggcatgcattgattacggccgggacgaaagggctgggcttacaagtagtggaaggattgctggaagcggggtacagtgcaacggttacttatttcagtgacaaggaaaaggctgaaacgctccaacaaaagtgggcccataaaaaattgcagcttgtccaagcggatgtcacgaagaaagaggacttgcaaacggcagcagcacaagccctttccttcgctggcagaatcgatttgtgtatccataatgccggcccttacgtgtttgaaaaaaagaagcttatggattacagcgaagccgaatgggcatatatgatcgatggcaacttgaattcagcgttttacctgctccagcaagtcatccccgtcatgcggaaacaatcatttggacgcattgttttttacggttttcaaggcgccaatagcgcgcctggatggatttaccgatccgcttatgcagctgcgaaagtcggacttgtttcgcttatgaaaacggtttcgatcgaagaggcagggcatggcattactgccaatatggtgtgccctggcaatattatgggtgaaatgaaagaatcgacgattcaagaggcacgagagcgaaacgacagtgatacgccgattggccgctctgggacaggggaagatattgccagaacggtgttgtttttatgtgaagatgatgctgatatggtaacaggaacggtcgttgaagtaactggtggagtcgacgtcattcaccgttatcggtaaatgcataatcacacatgtttttgcctaccttagtaataaaaaggtgggctcgtccaaatgaaacacacacttatgtatacgacgctgtttgctctattattggcggcgatttgcccattgcctgtgtctgctgtatcggggacggagcttatggaatctttttcactacgggtgacggtcattgcagagggagtcgaacatcaatgggaatacgataacccaaaccattatgagtatgaaaaaggcaattacgttataaaaggggaggaagcccggtcccatgtagaagaaatcgtcgatttgctccaaatcaatgaggaaacgacagaagcagaatacgctgatcggctttctgctaaattccccacgatggaacgcttagaaattcgttggatgaatagggacagcgaacgttttacatggttatggacaaagtaagcgaataaaaaagggtaaagcaaagtggcctgcgaggagaaggccactttgcgtttttacgagctggacagagcggttataagcgaacaggcacagggtccagcgttttcgggtagcttgtcattacctcgcacccagcggctgtaataacaacatcgtcttcaattcgtacaccgcaacgatctggtatgtagatgccaggttctactgtaaaggtcatccgttcttttaaatggttttggttgtcttggtgcatggagggagactcatgtacatcaatgcctaacccgtgtccaagtcggtgtggaaaaaacgcgccatagccagcttctgtgatcacatggcgtgcagcttggtcaacagcgccaatgactgcacctggcttcgcagcagcgagcgccgcttcttgcgctttaaggactgtatggtaaatagtggcctcctgttcggaaacgtttccgtaggcaacggtcctagtaatgtcggagcagtagccctctaaaacgacgccaaggtcaaaaaggacaaactcgccttcttgcaattggtgattgcctggctttccatgtggtgcgctcgcatggtcgccaaagaggacggttgtctggaatgacatttcccggatgccttgttgtttcaggccatattcaatcgccgcgacgacttccatttcggttacgcctgtttttaatgcggctacgcctaactctacccctctatcagcaaaagcagcggcagcacgcaatgtttgcagttcttcattcgttttctgaaggcgctgctccattaaaagtccttcacagtcagtaaacgaaacctgtttatcaagggcttgtaaagcgcgaatccgttcaaaagagacaagccgttcttccacacatataagtggcaagttacggggctcgtgctcgggaatgcgggcatagatgttttcccaaacattttcattatcactatatgaaagaatatcgccttcgtatccagcttttctgaccatgctttcttccattttaggaacaacaagaaaatggctatttggaaaaacaaaaaaggcaatgaggcgttcatgggggtccgtacggtaaccggttaaataaaagacattttctttgcttgttataaacgcaaaccaagcttgcttttctcccatttgcctttgcaatgtttgcagccgttccaatttcaaatgaatcctcctcctttctttaagtatacggtaaaatagttttagtcgaaagaaattcggctataaatcaaaaagagacaaacattcgaaaggagcgcttgcgagtgaaagtaagttaccatggccattccgttgtccagattgaaacaggtggaaaaacgattttaattgatccgtttattacaggaaatgaattgactgatttaaacgcagaccatgtggaagccgatgtcattctgttaacacatggccataatgaccatgtcggcgatacagtcgcgattgccaagcgcacaggggcactggttgtcgctgtagccgaattagcaacatacatgggctttcaaggagttgaaaacgttcatccgatgtccattggcggcgcataccagtttgactttggccgtgttaagtttacacaagccttccacggttcttcgttcacagaggaagatagccaaaaaattgtctatacaggcatgccaggcggcattctgttcactgctgaaggcaagaccatctaccatgcaggcgacacagctttgttcagcgacatgaagcttattggcgagcgccatcctatcgacttggcctttcttccaattggcgacaactttacaatggggccagaagatgcaaaaacagcaacagaatggattggcgccagcttaactgttccaattcattacaacacttttccgccgattaaacaggatcctcatgcttttgttaccagccttcaaagcggcgaagggcgtgtcttggaagttggcgaaacgatagaactgtaaaaatacggcttatttcaacaatttgacgttcacatcaccgatgtggacgtttgttctttttaagagcggcaatgcataggcataggacaaggggggagcctatgaagcaacgttcgttcatttgtttgcttgcagccatcgttttagtcgtttatgcattcgattatttgccgatacatgaagaaggaatcgggcaaatgtttgcctattcttggcttgcattcgccgcgcttgtcattgctggaaatggggtcgctgtgctaggcggataccggcaaaaagcgcagaaagacaggcaacaggaaaacgccgaaccggaaaaaagacgagaatttggttaagaagttgctatggcgccgcgtcaagtcgtatactagataaaagagtgatacggtgaaagcgtggtgccaaggtgacgacaaagcatgaacaaatacttgaatacataacacaattgcaaataggggaaaaaatatcggtccggtctattgctaaagctttaagtgttagtgaaggaaccgcatatcgcgccattaaggaagcggaaacgcaagggctcgtttcgacgattgaacgggttggcacaatccggatcgaaaaaaagaaaaaagaaaatatagaaaagctcactttcgcagaggtcgttaatatcgttgatggacaagtacttggcggtcggacaggccttcataaaacactaaaccgttttgtgattggtgccatgaaaacggaggcaatgatgcgctatgtgacagcggggaacttgctcattgtcggcaaccgctaccaagtgcataagattgctttagaaacaggggcagctgtcctcataactggcggatttagcacgagcgccgatgcagtccgtctggctgatgaacttaacctccctattatttctacatcctatgacactttcacagtagcagcgatgatcaaccgcgccatctacgaccaattgataaaaaaagaaattgtcttagtagatgacattttaatcccattgcaggatacgtactatttgacagtgacgaatacgattggcaaatggcaagagttcaacgagcggactgggcatagccgttaccccgttgtcgatgaggcaatgagggtacaaggaatgattacagcaaaggatgtatttgataagccgaagcattggctgattgaaaaagtgatgactggcgacccgattacggtcaatgaacgtacttccatagccgcggttgcccatttgatggtttggcaaggcattgagttgctccctgttgtcgaccaacagcgaaaattgattggtgtggttagccgccaagatgtattgaaggccttacaaacaacacaaaggcaacctcatgtcggagagacgatcgaagagatcgtgacaagccggatggaagaaaaacgaagtggaaatgagttgcttttcacttgtgacattacaccgcaaatgaccgaccatgttggaaccgtttcttacggtgttgtcatgacgttgatggttgaggcggcaaggcgaacgatgcggaaacacaagcgcggggatttggtgcttgaaaacgtcacgttgtattttttaaaacctgtgcaaattgacagccatatttccatcatgccatctatattggaaattggccgaaaacatggcaagtttgatgtcgccctctaccacgaaggtgaacttgtcggaaaagcaatgcttactgcccagttgattgaatagtgaagcttgccagtagggcaagctccagactgtagacacacgctcgcatcttcgtggctcacctcgactgacaagcgttacagtcagtttgagtgatgttgtctaatccagttgtgctgcataatgtttatgagcgcgaaatccgtaaatggcgttcgcgaggccgaatataaggaagacggctccgacaatgagttgaatggcggtataaaacgaaaaaaaggctaagttaacgccaagggcagtcatcgtggcgcctagagccaagcgggcccgtgattcgagaatccgtttttccaaggaatcctgcaaacgaaaggcacggacacgggtaattacataaaacataaatgcggcaatcgcaataatgatcaaaatacggcccatataaacctcctgttacgacttgcatgagtaaataaagcgatttcttttattgtatcgcgaatgggaaggtttgaccagccgcacaaataaggaggaaccatgttttcgatcatcagtgaacacattcaacaatatgagacgattattatacaccgtcatgtgcggcccgatcctgatgccctcggctcacagctcgggtttaaagctctgatcaaacaggcgtttcctgagaaaaaggtctatgctgtcggtgaagaggagccatcgctggcttttttcggaaaaatggatacgattgaagatgatgtatacaaaggggcgcttgtcattgtctgtgatacggccaatacagagcgcattagcgaccaacgctataaattaggggaagtcgtgatcaagtttgaccatcatccaaatgaagagccatatggcgatctcgtttatgttgacacgaccgttagttccacaagcgagttggtcattgcctttacagaagtagcacgtgtattcaagcttacagaagaggtcgctttcttgctctatggcggcattgtcggcgatacaggccgtttccgctttcgcaacacgactgccgacacgctccggagaacagcaacgctacttgaaacaggatttgacagcaatgcattttatcggaacttgtacaagcgttcattgaacatggttcgccttgaaggatacgtactgcaaaactttgaagtgatccaagaaaaggttggcgtgattaagctgacggcagaacaattacaccgatttggcgtcacagccaatgagtcttcgttgcttgtcaattgttttgctgatgtggaaggattggaagcttgggctttctttgtcgaagaatcagagacgaaaatccgctgccgcttacggtcaaaatcagtatcgataaatgaaatcgctaaacggcatgctggtggaggccatccagttgccgctggagcgacagcctactcgtgggaagaaacagacgtaattacgactgaacttgttgaagcttgcacgtaagaggcaagtggcaaaaaacaggcacgtgcctgttttttgctgtataagcggttagcgaatgcttttttcttcaataatttcaacattgagctccatttcagtcatggcaaagaagctaatcgttttgacgcggtattcgttgttgttgagcgtgtatgttttattttcgactgcgcttaagatcacttcttttatgcttgcgatggtttcgatgttggttccttgcaaatggcgcagttcctttaaaatttgctgttttaattcatacacattcaattggctaaggtggtacttgtcgctattcgtcaagttgacagtcacgctttggacaattaggttctttaagttttcctcgttatgcaacgtaatgtcgttaatgagctggtcattttttgcccgtaattcattgatgataatgctctgtttgcccatctcattatacaagtgatcataccgttcgccgtactcagccagaaaaaagccccaaccaatcaatgtgccaataagaatacctgaaaaaaagcgaagccagcctcggtgttttctgtagtttggtatatacattagacggggtctccaacaatccaccgaagtagaatggttcctgattgggcgccgcaaaaagcaacaagcagcatcgctagcgttcggtaaatgtcttcgtggacgccgctgaacaagcctgtttcaattttggtgattgcttcaaaagagccgccaatcgctgcgacaattgcccatattttcaaactgttggaaaggctgtaaatttcaattaacaccggtttgccgattaaaaaagcgccaatgccgccaattagcgctccgccgatcatcacgccgaaggcaataaaaaagttcatgactaaatgcgctagcatttcctttgtcaaaagcataggttgctcacctcgtccaagaaagctttactttcatatataaggccgagggcggggaattatgcaggtcaattgtggacaagtctggaaagttgcatagggcgcccttttccattaaagtcatttttattaaggattgtagcgaaaaataagaggaagtggtttcgtggatgccctgattacgaatgtttacagcgaatacagcttactccagtcaacgaaccgggtggatgagcttgtacaagctgctaaggaagctggctacacagcgctttcccttacagatagacatgtattatatggggctgtgcctttttttcaaagctgtcgtaaagctggactcaaaccgttgcttggcctcgaagtgactgtccgactcgatgaagagataataccggtacggatggtcgccaaaaatgaagaaggttatcgccaacttgttgcccatagtacatcgcttggctttcaaactaaacaggcagcgattgagctagaaacatggaaagcaaacagcaccgcgtgttttgtttttatcccgaaagaagcctttgttgcggcaaaaggcaattggctgcgcttttgggagcgcctagctggtgggcttgaggcgtttatcgagcttgcaggcggcgaaagcgaccacgagctcatacagtttgcgaatgcccaccaaatcccgtgtgtggctgctccgccaacccggtttttgcgcaaagaggatgcgcctgtttaccaacttgtgcgtgcgataggggctgggacgacgacgactcaccttgaattagaagagggctggcaacggtggcatttgccgaccgcaaactcgctgaaagaacgttttcccgaaaaagcgcttttgcaggcaagggcgcttgcggaaaaagttgaaccgtatttgcctgaagaaaagccgcgaatacctgcttacgatgggcttacggttgaacaagcagataaacgcttagaaacgttatgccggcaaggtttgaaagcacgatacaaggcagtgtcagtagaggctgaaaggcggttggaacatgagttagcgattattgcagaacggggtttttcctcgtattttttaattgtcgctgactttgtcggctatgccaaaaaatcaggcattttaacaggcccaggcaggggctcgtcggctagttccatcgtcgcttatacgttgttcattaccgacgttgacccgctagcccatgatcttttatttgaacgctttttaaaccctgagcgtgcaagtttgcccgatatcgatgtcgattttccagactatcgccgtgatgaagtgattgcttatgttagagagcggtttggccatgatcgagttgcccaagtgttaacgtttggcacatttgcagcacgcgctgcgattcgcgacgttggaaaggcgctgtcgatccgccatacttttgtcgatcgcgttgcgaagtcgttaacccctgcttctctcagccttaatgaagcgcaggaaaaaggcgtctttaaaggccttgaatcgcctgaactggacgagttgctttttttcgctaagcaaattgaagggttgccaaggcatgcatcgacccatgctgcaggagtaattattagcgacaagccacttaacaataaaacagcgttgcagttagggatcgacggccatgcggtgacgcaagcggatatggatagtttggcgcgtctaggtcttgtgaaatttgactttttggggctgcgcaatttgacgttgcttgaacggatgctcaaagtaattgaacaagaagagggtgtcgcattaaatttgcagcatatcccactcaatgataaagccactttccagctgcttcaacaagggaaatcaacgggaattttccaacttgagtcggcaggcatgaggcaagtgctgaaacagttgcagccaagccagtttgaagacattgttgctacaagtgctctttatcggccaggaccaatggcatttattccagaatacatccgtggcaaacatggacacacgcaagctattgttccccatgaatcgctgcgtccaattgtcgagcctacttttggcgttctcgtttaccaagagcaaattatgcaagtcgtgcaggcgacggccaattatagtttagctgaagcggatttgttccgtagggccattagcaaaaagcaacatgatgtcatcattcaagaaagacaccaatttattcaccgggctgtcgaaaacgggtttttacctgaagaggcagaggctatattttcattaattgagcggtttgccaattatggctttcctaaaagtcatgccacagcttacagtttcattagctactggcttgcttatttgcgtgtccattttccagctgccttttttgctgcgcttttttcctcagtttggcaaaatcacgaaaaattgtattcgtatataaacgaggcgaaaaaagaaggcattcgtgtgctgcctccgtctgtttgcaaaagcggcctgctatttgaacttgaaaatggccaaattcgctttggtcttttgccaatttctggtgttaacgtccaagcggtcaatgaaatcatcagcaagcggcgaaaaaacagcgacagcaacttgtttatgttttacgcccatgttgcctcaacggctgtcaacaaacgggtaatggaagctcttattaaagctggggcattggatgagtttggccaatcgcgagcgacgctgctcggcaacttggataaagcagaagcttttgttgagcaagtccgttcgtttaaagcatcttcaggagggctgtttacaatcaagcctgccgttccagcttacttggatgtgacgccgtctacgaaaatggaagatttagaaggggagcgtgaagtgcttggcttttatttatcgggccacccaattgaaaatgaactagagcggctagcaccattcggtcgtatccctttagctgaatgtatcccttcaagaaagccagtacgaattgcgggaatggtcatcgatgtaaaaaaaatagtaacgaaaaaaggcgaagcgatggcctttttgactctgagcgacgaatcgggcgagtgtagttgcgtggccttcccccaagcgtggaaagtatatgaagggctgttcgccccccacgcccttgtgtttttagaaggcgtattagaagaacggcaaggaaaaacgcagtttattatccataaagcagctgatgttttgcaactaaacaaaaacaagaaaaaacaaacgctctatattcgtctaacggcggacaaagatcagcctacacgcctgagcgacttaaaatatgtgctaagccaagatgtcggttcaacacaagtgattctttacagagaaaaagaacaggcgcgaacgcgccttgcagatgaatacagtgtcgcgccaacaaggaagacgcttcagttattaaaacaaatgtttggcgaagagaatattgtgctaaaaagcgacgaagagtaaagagagcccatttaaatcaagatttttacgggaaaccttgcgctacctattggcgtatggacaggagttgtttataatagggagcgtagaattgagtggtctgaccagtgagcaaaacgaaaaggagagagatacgtgccaacgacgagagaagaagcgcttcacatgcaccggataaaccaaggaaaactagaatcaaaagcgaaagtcccagtgaaggatgcccgagacttaagcttagcctattccccaggtgtagcagaaccgtgcaaagaaatttttgaagatgttgaaacggtgtatgagtacacgatgaaagggaatatggttgctgtcgtcagcaatggcacagccgtgcttggcctcggtaacataggcccagaagcttccctccctgttatggaaggaaaagcggttttatttaagtcgtttgccggtgtagatgcttttccaatatgcctccgttcaaacgatgtcgatgaaattgtcaatacggtgaagttgcttgagccgacgttcggcggtgtcaacttagaagatattgcggcaccagactgctttgtgattgaagagcggctaaaaaaggagacaaatattccgattttccacgatgaccagcatggcacagcgattgttacccttgcaggcttgatcaacgctctaaaaattagcggcaaaaaactgtcagaaatcaaagtagtcgccaatggcgcaggagctgctgggatcgccatcattaaattgatgctccgcatgggtgtgcgcaacattattatgtgcgatacgaaaggcgcaatctatgaaggacgcccatatggaatgaacgcagtcaaagaagcggttgcaaaacggacaaacatgaataaagaagaaggcaagcttgaagatgtcattaaaggggccgacgtgtttattggtgtatccgttgaaggggcagtcacaaaagaaatggttgaaagcatgaatgacaacccgattatttttgccatggctaaccctgttccagaaattatgccagaagatgcgaaagcagcaggcgcttctgttattggtactggccgttctgatttcccgaaccaagtgaataatgttttggcttttccaggaattttccgcggagcgctagatgcccgtgctacccatattaacgaagagatgaaagtggcggctgtttatgcaattgccaatttagtttctgaagaagaattgtctgttgattatgtgatcccagcaccatttgactctcgtgttgccccagcagtcgcggcggcagtagctaaaaaagcgatggaaacgggcgttgcccgcgtaaaagtagacccggaagaagtagctgaaaaaacacggaaattagcgattattgattgattgggcgagtgaaaaatggcagctgaccagccaaaaaggtatatagagatcattcgggccgtaagtgagatgattcaaaacgatggcttgaaaagtggcgataagcttccttctgaacgggaactcagcgaccggcttgatgtcggtcgctcctctattcgcgaggctttgcgtggccttgagctcctcgaccttattgaaacaagaagaggcgaaggcacgtttatgaaggcgacgtcaagctataaattggtcgacctcttgctgtcttttgtcctaaaagacgagcaggcgaggaaggatttgactgagacaaggcgaattatagagttggaagcattaaaacttgcttgtgagcgaataacagacgagcaaatcaggaagcttgacacgttgattttacgttccaaaaaagagtggaatcaaggagactttcctgttgaagaagactatcgttttcataaaacgattgtgaaatcatgccaaaacgtcctgctattccacatttggaaatcactcgttgcttttaataaagaagcgatcaaagaatcccttgaacggagcggccgtcctcctatatcgataaaagaacacgagcaaattgtggaggcgttaaagaagcgtgatagtgagcaggcgctattagcgatgcgtcttcatttgcaaaatagccgattttaagcaaggagccggctttagcatcaagttaggagcgaatatcatgttaaaagatatgttctcaaagaaaaaaaggtacgcgacgattccctctgaacgggctaagcaggaagtgccagaagggattatgaccaaatgcccttcatgccgcacgattatgtatacaaaagacttaaaaaagaacttgagtgtgtgcaggacttgcgggcatcaccaccgcatgagtgcgagagagcgaattgactccatcattgacgatggcacgtttaaagaagcattcgcctctgtcaaaggaggcaacccactccagttcccagggtatgaggaaaagctcgagagcgaccgtaaaaaaaccggtttgaatgaagcggtggtcactggtgaaggaaagataaatggatatcccgttgtcattgcggttatggaccccaattttcgaatggcgagcatgggctcagcggtcggggaaaagctaacgagggcaattgaattggccaccgagacgagtgttccgttgcttatttttgctgcctcagggggagcgcgcatgcaagaaggcatgctcagccttatgcaaatggcgaaaacgagcgccgcacttgagcggctgaaccgagcaggagggctttacatttcggttatgaccaatccgacgacgggcggcgtgtctgctagtttcgcgtcccttggcgattacaattttgccgagccgaaagcattaattggcttcgctgggcggcgcattattgaacagacgattcgtcaggaacttcctgaagactttcagacagcagaatttctattggagcacggccagcttgatcgtgtcattccaaggctagaaatgaaagaaacgctgactaagctgttggcgatgcatcagtaacaagggaggatataaccattgtcttcggaacaagaatttgaaaaaccggtcattgagcttaggcaaaaaattgccgacctccgtgcatttgcaatggagagggatatggacctcagtacagaaataaaaaaaatggaagcccgcttaagcgagttggaagaagaagtgtacgccaatttgcaaccgtgggagcgcgtgcaaatcgcccgtgaccatgagcgcccaacaacactcgattatgtggacgttttatttgaggattttttggaaatgcacggcgatcggctgtttggcgacgataaagccattgtaggcggcattgccacttataaaggcaagccggtaactgtcattggccaccagcgcggaaaagatacaaaagaaaacattgtccgctattttggctctccacacccagaagggtaccgcaaagcgttgcgcttaatgaaacaagcggaaaaattcaagcgcccgattatttgcttcatcgatacgaaaggtgcctatcctggaaaggcagcggaagagcgcggccaaagcgaagcaattgcccgaaatttgttggaaatggccggattgaaagtgccgacaattagcattgtcattggcgaaggcggcagtggtggcgctcttgccctcggtgtagctgatgaaattcacatgctggaaaatgcgacatactcagtcatttctcctgaaggggctgctgcgattctttggaaagatgcaggaaaggctaaaaaggcagcggagtcaatgcgcatcaccgcccctgacttatatgaactaggcattattgattcaattattcctgaacctcgaggcggtgcccagcggaatttgcaccaacaagcagacgaaatcgaccgccttttagaaaaagcattaacaaggcttgctgagaagcctgtagacgtccttctcgatgaacgttatgaaaagtttatgaaaatcggtcatatccctgaggaagcggcaactacaggacaataggaagatggaagtgctttcattgtttggaagcactttttattgtgggacgatacttgttttcgacaaatcaaagtggtatctttacttgcagagactgcagagaaacacagctgctttgctttgatatgagtgtgttaggaggatttgcattgaaacggataggtgtattaacaagtggcggggattctcccggtatgaacgcggccattcgtgcggttgtccggaaagcgatttttcatggtttggaagtgtacggcatttcctatgggtaccaaggtttaattaatggcgacataaaaaaaatggagcttggctctgtcggtgatattattcaccgtggcggaacaatgctttacacagctcgctgtgaagaatttaaaacgttggaaggccaacaaaagggcattgaacagctgaagaaatttggaattgaagggctagtcgttattggcggagatggttcttaccgcggcgctcaacaattaacgaaacatggttttccaacaatcggcgttccagggacgattgacaacgatattccaggtactgattttacaattggttttgatacagcattaaatacagtcattgacgcgattgacaaaattcgtgatacggccacttctcatgatcgtacatacgtgattgaagtaatgggccgccatgcaggggatttggctttgtgggctggccttgccgatggtgcagagaccattgtcattcctgaggctgagcataatatggagcaaatactcgcaacgattaaacgtggccaagaacgtggcaagaagcacagcattattgtcgtcgctgaaggggtcggttcaggcatagagttcggcgaccggatcagcaaagaaatgaatatggaaacgagagtaaccgtgctcggccacattcaacgcggaggatcgcccacaggggcagaccgtgttttggcgagcagacttggtgcaaaggcagttgatttgttgttagaaggcaaggctggcatgacagtcgggattcaaaaaaatgaacttgtttatcacccaattgatgaaattttagaccgcccacacacgattgatcaagaaatgtacaagctatctcaggaattatccatttaacagcaacacacctattaaggaggaacgtatgcgtaaaacaaaaattgtttgtacgattggaccagcaagtgagtcgcttgaaaaactaacagcactcatcgaagcggggatgaatgtagcccgtttgaatttttcacacggtgattttgaagagcacggtgcccgaattaaaaacattcgcgaagcggcaaaacggactggaaaaacggttgctattctacttgatacgaaagggccggaaatccgcacacaaacggtagaaggcggagcgattgaacttgagaaagggcaagagctcattttgtcaatgaatgaagtccaaggtacgaaagaaaagatctccattacgtatccagggctttgcgaggatgtagaagtcggaagtacgatcttgctcgatgatggcttaattgggcttgaggtaaaggaaatccgcgacactgagctggttacgattgttcgcaacagtggcgtgctgaaaaacaagaaaggcgtcaacgtcccaaatgtcagcgtcaacctaccggggatgaccgaaaaggatgcagccgacattgtatttgggattgagcaaaaagttgactttatagccgcctcctttgtgcgccgcgcttctgatgttctagaaatccgcgagctccttgaaaagcatggcgctgcagatacagcgattatcccgaaaatcgaaaaccaagaaggcgttgacaatatcgatgaaattcttgaagtatcggacggccttatggtcgcaaggggagacttaggtgtagaaattccagcagaagaagtaccgcttgtgcaaaaacagctcattaaaaaatgcaatgagttggccaagccggtcatcactgccacgcaaatgcttgattccatgcaacgcaacccgcgtcctacacgagcggaagcaagcgacgtagccaacgctatttttgacgggacagacgccattatgctttctggtgaaaccgctgctggtgattaccctgtagaatcggtgcaaacaatgcacaatattgccgaacgaacagaacaagccctcaattatgaaaacatgctgcgtcggaaaagcaaagaagtgaaaacatcgattacaagtgcaattggccagtctgttgcttacaccgcctcaaacttgaatgctgctgcgattttaacagcgacagaaagcggctatacagcacggatgacatcacgtttccggccgaaatcgccaatcttggccgtaacgagcaatgagcgtgcttaccggagaatggcgctcgtgtggggggttacgccaatacttggtaaacaagcaaacacaactgacgaaatgttagaccgtacagttgaagcggctgtcgctacaggagtggtgaaacaaggtgaccttgttatcattacggctggtgttcccgttggggagtcaggcacaacgaatttaatgaaagtccatatgcttggggaagttgcagcaaaaggacaaggcatcggacgtcgctctgcctcaggaaaagtcgttgttgcccgtgacgcaaaagaagcgattgcaaaagtaacggaaggctctgtgcttgtcacaaaatcaaccgataaagacatgatcgaagcgttcgagaaagctgctgctgtcgtgactgtagaaggcggtcttacatcccatgcagctgttgttggcttaaacttgagcacgcctgttatcgtcggtgtagccaacgcccttgaacgtttccaagacggcgatgaagtgactgtggactgcattagcggaaacatttacagcggccaagcccgtgtattataatggaataatcaaactggctgatagaaaatgcttcgcaaaccatgatggatgcgagcgtttgtctacagtctgaaaaggagaggtgagcctctccttttttacagtcggcaaaggtggtacgaacaatgaagaaatcgattgtcgtcgctgcgatcgcgattcccgtattggaactgtttatcattacggcctttgtcaattggctaggcatatggcaaacgctgcttcttatgtttgctacgtcaatactaggctttatttttgccagaaaacaagggatgcaagtgtaccgacttgctcggctacagatgcaaaacagccaaattccaagccatgcattgcttgatgggttgtgcattttgtttggtggcattctactcgttatcccaggtttcttaacagacgccattggtttatttttccttattccatggacacgtgcgattggaaaagcactgctgctgaaaatcgttcatagcagcatgacaaaagggaactggaccgtgataaaacggcgctaagtttgtctgaatttgtgggatatagccgaatttgcaaaactgtgttatgatatgaattgcctagttgaagctggaggagaaaccattgttatctcagagtaccttgtttttgttgctattaatggcgatcgcccttattgcaaaaaaccaatcattaatcatcgctatttccgttttgttactgataaaatggacagggcttggagataaagtgtttcctctcatgcaggcaaaaggaatcaaccttggcgtcaccattattaccatagctgtccttgtgccgattgctacaggggatattgggttcaaacagctgggagaagcaacaaaatcattgtatgcatgggttgcacttggcagcggcatcgctgttgcgctcgtagctgcaagtggcattgacttgctgaaaaacgatccgcatattacagctgccctcgtacttggcaccatcgtcgctgtttcttttttaaacggcgttgcggtcggccctttaattggtgcaggcattgcttatttgacgatgcgcgctatccaatacatcgcccaactatggggataagtgtcacggccgtatcatcctttacgacgtttttcgtaaccgctttaccaggcgttgtgcgcgaagggatcatatttacagaaaaggagagataaaggtgactacaactcgtggtttagaaggtattgtggcaacacaatcgagcgttagctccattattgatgatgaattaacgtaccatggttatggcattgacgacctggccgaaaatgctagttttgaagaggtcgtttatttgctgtggaatggtgaattgcctacgaaagaagaattggaatcgttttcaagagcgcttgctgaacaagcgggcgtccccgatgaaattttcgaacaaatgaaagcctatccaatcgatagcgtccatccaatggctgccctgcgcacatctgtttcaatgcttggtttgtttgatgatgaagcagaatcagtcgaggaagaaaaaaattaccgcaaagcgattaaacttcaagcaaaaattcctacaattgttgccggctttgagcggatccgttctggcaaagaaccgattgctccaaacaaggagttatcgtttgcagcaaatttcctatacatgttaacgggcgaaaacccagatgcgatttcagtaaaagcttttaataaagcgcttgtgctccatgcggatcatgaactgaacgcctcaacatttacggcgcgtgtttgtgtagcgacgctgtctgatatgtattcaggcattacagcggcaattggcgcattgaaagggcctcttcatggcggcgcaaatgagggcgtcatgaaaatgcttcttgaaatcgaagaatttgagcgagtggaaccgtatatccagaaagcgcttgataataaagagaaaatcatgggctttggccatcgtgtatacaaaaatggcgatcctcgggctaagcatttgcgggaaatgtccaaacaactaacagacgttattaaagaatcaaaatggtacgacatgtctttgcggattgaagaattggtcaccactcaaaaaggcttgctgccaaacgttgatttttattcagcgactgtataccatagtcttgggattaaacatgatttgttcacgccgatttttgcgatcagccgcacatctggctggattgcccatatcctcgaacagtatgcaaacaaccgcctgattcgtccgcgtgctgagtatgtcggtccgaacaaacgcagctacaaaccagtagaatcacgatagtcctaggcggaggaaactccgttctacataaacatctttaggaggttttactatggcagcagaaaaaattcaaactcaaaacggtgttttaaacgttccaaacgagccaatcgttccattcattgaaggcgatggtacaggcccagacatttgggcagcagcttctcgtgttcttgatgctgcagttgagaaagcatacaacggcgagcgcaaaatccactggaaagaaattcttgccggtgaaaaagcgtacaacgaaacaggagaatggcttccagcagaaacgcttgacgctgtccgcgaatatttaattgcgattaaaggacctttaacgacgccaattggcggcggcatccgctcattaaacgtagcgctccgccaagagcttgatttgttcacgtgtctccgtccagtccgttattttacaggagtgccatctccagtgaaacgtcctgaagatacggacatggtcatcttccgtgaaaatacagaagacatttatgcagggattgaatttaaagaaggctctgacgaagtgaaaaagctaattgcctttttgcaagatgagcttggtgcaacgaatatccgcttccctgaaacttctggtatcggcgtaaaacctgtatcgaaggaaggaacagagcgcctcgtccgttctgccattcaatatgcgcttgatgaaggccgcaagagcgtgacgcttgtccataaaggcaacatcatgaaatttacagaaggcgcgtttaaaaactggggttacgaattggctgagcgtgagtttggcgataaagtatttacatgggctgagtacgataaaattgtggaagaaagtggccgcgaagctgccgataaagcgcaaagcgaagcagaagctgctggcaaaattattgtgaaagatgccattgccgacattttcttgcagcaaattttgactcgcccgaaagagtttgatgtggttgcgacgatgaacttaaacggcgattacatttccgatgctcttgctgctcaagtaggcggaatcggcattgctccaggagcaaacatcaactatgatacaggtcatgccatttttgaagcgacacatggcacggcgccaaaatatgcgggactcgacaaagtcaacccttcctcagtcctgttgtcaggagaactgcttttgcgtcaccttggctggacagaagcagcagatttaattatggcgtcaatggacaaaacgattgccagcaaagttgttacttatgattttgcccgcttgatggatggcgcaacagaagtgtcttgctcaggatttgcagatgaattgatcaaaaatctataaatctatttcgtgataagcagatggactacacacgttgaggagtgtttggcatggcaattaaacgaagaaaaatttctgtaatcggcagtggctttacaggagctaccactgcgcttatggttgcccaaaaagagctaggggatgttgttttattggacattccaaacatggaaggtcctacgaaaggaaaggcccttgatatgcttgaatcgacacctgtccaaggcgtcgattcaacgatcacgggtacctctagctacgaagatacgaaagattcggatgtcgttgtcattacggctggcattgcccgcaaaccgggaatgagccgtgatgatcttgtagccacaaatgcaaaaatcatgaagtctgtcacaaaagaagttgttaagtattcgcctaacagctacattatcgttttgaccaaccctgctgacgcgatgacgtatacggtttataaagaatcaggctttccgaaaaaccgtgtcatcggccagtctggcgttcttgacacagcacgtttccgcacgtttgtcgcccaagaactaaatgtatccgtagaggatgtcactggttttgtcttaggcggccatggagatgatatggttccgcttatccgttattcagcagcaggcggtgtgccgttaacaaaactgatcgctccagaacggattgaagaaattgttgaacgcacgcgcaaaggcggcggcgaaatcgttggcttattaggcaatggcagcgcctattacgcaccagctgcttcgcttacacaaatggtcgaagcgatcttgaaagacaaaaaacgcattatcccaacaattgcctacctcgaaggcgagtatgggcagcatgacctgtacttaggcgtaccgaccattcttggtggtgacggcattgagaaagtcattgagcttgacttgacagaggaagaaaaggcacaattggacaaatcagtacaatcggtgcgcaatgtaatggcagcattgccagcggagtaataggaaagctagaggctcttccaaaagcctataattgaacaatgggagtagagatttgacataaactctactcccattttcttgatcgattgtttttcaagcgatgttgttatttggcagacccgtgtgggtttgattgggtgtaatcgatgtggcaatggactttcatttcccgtacagcctgctttgcatggacacttatcatcgagcatgcccattcataatcagcttgtatccgtggcgatccgtacgtcggctataggctatagccacgccatgttacccaacactcataaaagtggttctcgagcatgcttatttatgtgggctgctctttttcacgtcttgcatcgttgccatcccctcatcttcaatcgggctattattgaagaagacatttaaagagttttgcttatcaactagaaggatgttgtgatttatggtttaatgaatgaagtgtttactattcattttgattcaatttgaaaaaggtgactgaaatggataaaatggatcgcgatattctgaaattgttgcaggagaatgcgcgaatgacaatcagtgaattatcaaaagaattggcgctaagccgtcctagtatgtcggaaaggctgctgcggcttcaagagaaaggcattattgaacatttcaccacacgcgtctcactgaaaaaaattggcaaagatatactgttgctgatccaagtcagtggtttaaaagtgcctgttgcggaatttgaagaaatggtgcgacaggagcatgacattattgaatgccaccgggtaacaggtgaagtgagctactttattaaagcggctgtatcagatgtaggcagcatgaggaaattaattgaccgccttattccgtatggaacgattaatacgtctactgtattaaattccccagtgccctatcggattattttgcctgatgaagagggatatgagtaaaaagtttgctatactagcattataaagagagagaccgttcaaatcaaaaagttaggagtgtaggaagcacctatggcaaagcggatactcgtagttgatgacgaaccgtccatctcgacgctcttgaaatacaatttagagcaagcgggctttgaagtcgaaaccaaattggatggccaagcaggttttgaccgagcaaaagaagcagattttgacctcattatcctggacctcatgctccctggcatggacggcatggatgtatgtcggcagctaagacaagaacaaatttttgtgccgattctcatgcttaccgccaaagatgatgagttcgataaagttcttggcttagaacttggggctgacgattacatgacaaagccgttctccccaagggaagtgaccgcgcgggtgcgggcaatccttcgtcgaattgaacaaacaggcggagccgtagcgaagaatgaacaaggaaaaggcaaaagcattcaaattgccgatttgacgatttacccgcaaaactacgaagtttatgtgaaaaaagaactgcttacattaacgccaaaagaatttgaactgcttgtttatttggcagaccataaagggcgggtgcttacacgagatcagcttctgaacgctgtatggaactatgaatttgttggcgatacacgaattgtggacgtgcatattagccacctccgcgacaagattgagcctaattctaaaaaaccagtctatattaaaacgattcgtggccttggctataagctagaggaaccagcaaagaatgaataaactccgcaaccgttttattttcagcattatgctcgttatcacgcttgttctcctagtattaggattaacgcttggttcctggtcaaacgagcgctatgttgactttgtttcagagcgtgttaaaaatgaagcagcactagcggtttgggcagtcatgcgcgatggctatccaaatagcacgcaagcccaacaaattgcagaagaaattgggactgaaattgaagcacggctaacgatcattgatgctgaagggaacgtcattggcgattcatgggctgatccaaaagaaatggaaaaccatcttgatcgcccagaaatccagcgtgctcgcctcgatgatgaattggaactgcgctttagtgaaaccattggtgaagaattgctttattacgcacttcctttagaagaaggcagggaaatgttcggctatgtccgcgtcggtgtgtctgtagagccgttgaaccatatgaatcggacggtatggacggttattggcgtcagctttttaggagcattcattttcattttgtttttaattacacgcatcaccaaacaaattatccatccgattgaccaagcgacaaaagcggctattcgcctagccgagggcgattatcagactaggacttatgaagatcaccataaagaacttgggctgttaggccgttccattaatgcgcttgcgtataatttggagcaattatcgagacgccaccaggcacagcaagaccgaatggctgctctaattgaccatatgggaagtgcgctcttgtttatgaatgttcgtggcgatgtggtgctgttgaaccaaacgacagagcaagtgtttgaagtcgatagcagtgattggctttcaaaaccgtactaccatgtatttccgagccaacctcttatccagtttgtgcaattggtttatatgacagagaagaaacagcgcagcctaatcgaatggacgaagcatttttcaactcgcgtctatgatgtatacggcgcgccggtaatggcggattcgggcaggctcagaggtgtgacgcttgtcatgcacgacattaccgaacaaaaaaagctagagcaagttcgcaaagactttgttgccaacgtttctcatgagttgaaaacgcccgttacatcgattaaaggttttgcagaaacgctccttgatggggcgatcaacgatcccgtgctttcgaaacagtttacagagatcatatggaaagaaagcgacaggctacaaatgctaatcgtcgatttgttggagctgtcgaaaattgagaatgcccagtttaagctcgatttggaagatatgtcattgaaagacatcacggaagatgtgtttgaactagtgcggggcaaagctgaagaaaaaggcatgcacttgcatatacaagaacaaggcagctccgtgattgaaggggatcggcaacggttgaagcaagttgtgttgaacctagtttccaatgcgatcgcctatacgccatcaggcggccatgtaacggtcgcactcaaagaacaaaaggacgctgttgttctaaaagtgcaagatacaggaattggcatcgacccaaaagaaacattgcgcatttttgaacgtttttaccgagttgaccgggcgagaagccgcaattcgggagggacgggattaggccttgcaatcgtcaagcatttggccgaagcacaccatgcaaaaatagaagtgcagagcgaagagggcaaaggaaccgagttttccttgacgttcccaaaaaaacagccaagcacactttaacaaaatctttacacaatgttcatcaaggcttaatggcgcgcgcttacactaagggagaacggtcagtaatgagatcggtatccctcttccgatcagccctttttaaaggcaagagtgaaactcttgccttctttttggttgactaaacacgtatactgctttctcttgtagcaactagcctcgattcatcagccattcttcctgccttcctgcgtacgttcgttcgcatatgcttttttcttttccagtgactatggtacaataagaatacatgtatagatcgagaaaggggctctcctgcttgaaaaaattagtgcttattgacggcaacagcattgcttaccgtgcattttttgcattgccgcttttaaataatgaaaaaggcgaatatacaaatgctgtctacggctttacgaccatgttgttgaaggttctcgaagacgaaaaaccgagccatatgcttgtcgcctttgatgcagggaaatcgacgttccgccatcagacttatgcggcttataaaggcacgaggcagaaaacgccatcagagctatctgggcaaattccaatgattcaccaagtgctcgatgcgttttcgattaagcgttatgaagtagacgaatacgaagcagacgacattatcggcacggcggcaacgaatgcagcaaaagaaggctttgacgttgttgtcattacaggtgataaagatttgcttcaattggttgatgaccgtgttgaagtcgtgctgacgaaaaaaggcatttctgaagtggatcgctataatcgtgaaaaagtggctgaacgctacgggcttgaaccgagacaaattattgatttaaaagggttaatgggcgattcgtctgataacattccaggtgttcccggcgtaggtgagaaaacggcactaaaattgcttgccgaattccgcgacgtagaaacggtgcttgattcgattgatgcgatctctgggaagaagctgaaagaacgtcttcaagagaataaagaccaagccctcctaagcaaaaaactcgccacaattgcccttgacgtgccacttgccgaaacgcttgattcgttcgagtatggcggatatgagtataaacaagttaaagaagcgtttaaagagctgtcttttcattcgttgcttggccgcattgacggcaacggcgatgaagaaagtgcaccacagcaattgacggaactggattttgatatcgttgaagaaccgttgcctgaacatttttccagcccgtcagcgttagtcgtcgaagtgttagcggaaaactaccatcaagccgaaattgccggtatggcggtggcgaacgagaagggctgcttttatttcccgactgagaaagcagtgaagtcagacgcgtttagggcatttgcccgttcgcaagaaaaaaagaaatggctgtttgacgcaaagcgcgctgtcgtcgctttagcctggcatggggttgaattaaacggcgttgattttgacttgcaaatggcttcctatttgctcgatccatcgctgtcatcccacgaaattagcgacattgctacccgtaaagggacaggtggcgtggctgaagatgaagctgtatacggcaaaggcgccaagcgctctcttccagaagaggccgccctagccgaacatctttgccgtaaagcgaatgccatgtttacgttaaaaagcacattggaagatgaactggcgcaaaatgagcagcttgaattgctcaagaagttagaaatgccattgtctgttgtacttggccgtatggaaaaagaaggtgtccgtgtcgaccgagaacaacttgaggaaatgggcaaagatttatcggatcgcttgaacactctagaaaaggcgattcataaagaagctggagaaccattcaatattaattcaccgaaacagcttggcgttatcctgtttgaaaaactagggttgccgcctgtgaaaaaaacaaaaacaggctattccactagtgctgatgtattggaaaaacttgcaggcacacatccaattattgaacaccttcttctttaccggcaacttggcaagctctattcaacatacatcgaagggttgcttaaagtgatcgattcggaaacagggaaagtccatacccgttttaaccaagctttaacgcaaacaggacgcctttcgtcgacagacccgaatttgcaaaacatccctatccgtttagaggaaggaagaaaaatccgcaaagcattcgttgcctcgaaggaaggctggaaaatagttgcggctgattactcgcaaattgagctccgtgtcctcgcccatatttctggcgatgaacggatgaaggaagcgtttttaacggggatggacatccatacaaaaacggcaatggatgttttccatgtaaaacgtgaggaagttactgatttgatgagaaggagcgcgaaggccgtcaattttgggattgtctacggcataagcgattatgggctctcacaaagcctaggaattacgagaaaagaagcgaaagactttatcgaccgctatttagcaagttatccacaagtgaaagcttatatggagaatgtggtgaaagaagcaaaggagaaggggtatgtccaaacactgcttgcgagaaggcgttatttgcctgaactgaaaagccgcaatttcaatcagcgcagttttgcagaacggacagcgatgaacacacccatccaagggaccgcagctgacattattaaacgggcgatggtgaaaatgagtgaagcgttagaagaaacagggcttaaagcaaacatgttgctccaagtccatgacgaactcatttttgaagtggcgcctgacgatgtggaaccgttacaagagcttgtcacagaagtaatggaacaggcacttgagcttgatgtgcctttacaagtggatgtctctagcggaaattcatggtttgacgcgaaataaggagaagagaaatgccagaattaccggaagtagaaacggtacgccgaacacttttgcagttggttaagaacaagaccattgcggacgtggacgtcggctggccgaaaatgattaaagaaccagatgatgtagaacgttttatacagctattaaagggacaaacgatcgaagacatcgggcgcagaggcaaatttttgctgtttgtgctcaacgactatgtacttgtctcccatttgcggatggaagggcgctatggtttgtatcaaccaacggatgaaaaaacgaagcatacgcatgtcgtcttttcgtttacagatgggtctgaattacgttatgcggatgtgcgcaaattcggtacgatgcatttgtttgctaaaggggccgaacacgttgccatgcctcttgcccagctaggcgttgaacctttttccgaacagtttacggtcgaattgctggaacaagcttatgcaaaaacaacacgagcgattaaaacagcattgcttgaccagaaaacagtcgtggggctcggcaatatttatgtcgatgaagcgctctttcatgcaggtatccatcctgaacggacggcttcatcactgtcaaaggaagaatatcacaaccttcataaggaaattaaaagaacgcttaaagaagcgattgaggcagggggcagctcgataaaatcgtatgtaaacggccaaggggaaatcggcatgttccaacaacagctccacgtttatggccgtaaacaacaaccgtgccatcattgcgacacagcgattgaaaagacagtcgttggcgggcgcggaactcactattgccccaattgccaaccacggccgtgaacaatgacaaagtcctctccatatactaatggcaacgaacattagacaggaggggcttctattggcaacattggttatgttggccgcggcagttagccttgatagttttggtgtcgggtttgcctacggcactcgtcgtatcaaaataccactcatatcgcttttatttattgcagcttgttcaggtatctctattttaatcgctatgtcagttggttctgccttatcgatgtggttgtcgcctgacgtggctgaattgctcggagcgatcattttaataggccttggctgttggactgtttatgcagcatatcggccgaaaaaagagcggaagccgcgtgttaaacagacgaaaatggattttacgattcgcttattcgggtttgttatccatattttacgggaaccagaaagcgccgacatcgaccgttccggcacagtgactggaaaggaagcccttttacttggcctcgccctatcacttgatgcctttggcgctgggattggcgctgcgttaatgggcctttcccctcttggccttgcgacatgtacggctattttaagcgccttgtttgtcacactaggtatgacgtttggctaccggacagcacggttgaagtgggtgcaaaaaatggcattcattccaggctgcttgctgctcattatcggcgtgatgaaattgtaggaggaacatgtacttatgagaattggcttaactggcgggattgccagcggaaaatcgcttgtggcaacctatttggagaaacagggcattccggttgttgatgcagataaacttgcacgtcaggtcgtagagcctggcgagccagcgcttgcccaaatcgtcgcgacatttggcgaacacgttctccaggacgacggcacgttagatcggaaacagttaggggcgatcatttttggtgacgaacaaaaaaggaagcagttgaatgaaattgttcatcccgctgtacggcaatcgatgaaaaaacaggccgatctatacgaacaaaggggctacactcgagttgtgctcgacatccccttgttatacgaaagcaacttgtttcatatggtcaaccaagtttggctcgtgtatgtagacgaagcaactcagcttcggcgtttaattgagcgagatggcttaactgaaacagaggcgaaacaacgaattgctgcgcaaatgccattaaccgccaaaaaagcacaggccgacgtgctcatagacaataatggaacgaaggaaaacacctaccgacaagtatacgatgcgttggctaagaccgcccacgaataggcggtcacagcctgaagacaagcgctcgcatacgtcgttgctcacctcgttcatatgctcatgaacccattttctattcgcatcttcactcggtttcgcgcctcgtctgacaaacgctttctttcagtctggacagttgtcgacagagtcgacaacttaagaccgccattgaataggcggtcttttttgtgcctaaattgaaattggttcacgtttttggtttatttatgttatactatttcatataatattggtaaaaaggataacataataacctgaaggggctggactttatgaatgtgaaaatggcaatcaacgggtttggacgaattggtcgaatggtgttccgaaaagcttttttagaagggaaagtggacattaccgcgatcaatgcttcttaccccgcagacacattggctcatttaatcaaatacgattccattcatgggccatttatggccgacgtttatgcgaaagatgggcagttattcgtaaatggaaagaagattgaattgctcgctgaacgggatccgcggcgcttgccttgggaagcgttagggattgatattgtcattgaagcaactggaaaatttaaaacaaaagaagcggccggtgctcatttgcaagcaggcgcgaaaaaggtgattattacagctccggcaaagggcgaagatgcaacgattgtcgtcggtgtaaatgaaagcgactacaatccacaagaagatcacattctctcgaatgcctcatgtacaaccaattgcctagccccagttgcgaaagtcctcgacgaaaaatttgggattgaatcagggatgatgacaacggtgcattcgtatacgaatgaccagaaaaacattgacaacccccataaagatttgcggcgcgcccgtgcatgtggacagtccatcatcccgacatcgactggagcggctaaggccctatcaaaagtgttgccgaatttggacggcaaactaacaggaatggcgcttcgcgtgccaacgccaaatgtttcgttagttgatttagttgtgaatttaaaaacagaaaccactgcagaagccatcaacaacgccttttgggaagcttcacaaggaacacttaaagggatcttaggaattacagatgaacctcttgtttcaatcgactttaatggtgaggaacaatcggcggttgtggacggtcaatcaacggcagttttaaacaatcgtcaagcaaaagtccttgcttggtatgacaatgaatggggctattcatgcagagtagttgatttaatgaatcatgtcgcagcccagatgtcgacaaaagaagaaatccattctgcatcgtaagcatgctgtaaaattgtttagaaatccagttgcaatcgcggtgtaaaccaagtatactgaatcccgtgagttcgtttaaaaacgggattcgtttttcttgcagcatgggttaggacctcttaggactaactttcccccctgtacgaagacgatcctacatgcatgcttttgctgcatggcgaattaccgaaaagggggaagttcatatggatacaatgggacgtcatgtcatttctgagctttggggttgtgacacaaacaagctaaacaacatggaatttatcgaacaagtatttgtaaatgcagctttaagagctggagcagaagtgagggaagtagcgtttcataagtttgccccacaaggggtgagcggagtcgtgatcatttctgagtcgcatttaacgattcacagtttcccagaacatggctatgcgagcatagacgtttatacatgtggtccagttatagatccaaacgttgctgctgagtttattgcaagagagttgaatgcaacaacaagcgaagtgctggaattgccacgaggaatgggaccggttaagccagaaaaacgattaagccacagtgctgttaaataaattaggggaaccgccgagcatactgcttggcggtttctttttgctataaatggatgcgctttcgtgatttatggtatgataaaggcaacgtttacacagggggagagagcaggatgggttttcgtgaaacaatgaaccgtattttcagcacacgcactgaaaccggggaagagcacccagtgaaagagttgcaaacacgttactataaaacaacgaaagacaaggctatgcgtacaattgaacaagtgctgacacaacaaggattgacgataaagcggagcgaagatgacagaggggaaattgtggcacaaacgaaatcagggaaaaaactactgttagtcgcatccattattacagtaaaaccgtatcggaccgcggttgatttttcttgtgcaacggaaaccgtgcttccaagcgattttggctacagccggaaattcattttagctctttaccagaaacttgaccaggaattaacgtacgtcggttcagcgctaggccaagagctgctgtaagaggcttgccacaggcgccctttttttatatgatagaagaaaccaatctcattttggtattcacgtcctttgggcacagatggagatgattgcaatgcgctgtcccaaatgtcagcataacggcacaagagtgctcgattccaggccaagtgatgaaagccgctcgatcaaacggaggcgggagtgcgaaaaatgtttgcaacgttttaccacctatgagacagtggaagaacgacctcttctcatcattaaaaaagacggtatgcgtgaggaatttagcagtgataaaatgctgcgcggtcttgtgcgtgcctgtgagaaacgccccgttccccttgaaacgcttgaaaaaatggtattggacgtagagcgcacgcttcgcaatgaagggaaacaagaagtacggagtcaggatgtgggcgaactcgtcatggaacggctagcgaaaattgacgatgtggcttacgttcgttttgcttctgtttacagacagtttaaagacatcaatgtatttataaaagaattgacagagttaatgaataaaaattaaaaggagctataaacgcatggagcgttttaagctcttttttagcgaaaggggtaagggccatgccttggcattggaaagaagttcttcctgtagaccagtacacagtgcggctggccgatgttatcacagacatggataaccatgtgcttacccttttgtaccagcctttgattggcactgaagctgttggcctatacaatagtttgagatcgcagcttccgtcagggaagtaccaaggcgatatccatactcaccatcaacttagcgtcctccttgacttgagtttgcctaagctgctcgaagcgcggaaaaagttagaagcaatagatttgctcaggacataccgaaaaaaaacagatgacgtccgcttttttatgtatgaattacagccgccaatgaaaccgcaccgttttttccgagatgatgttcttagcgtttttttgtataacaggctaggcaaacaaggataccgggcagtaagggaacgctttgctctgcccgtgctggacagtagcgagtttgaagaagtgaccgaatccttttccaatgtgtttgcctctttaactcattcagaaatgcagccagcgttaatgaacgaacaagatggtgcattgaaaggggcaaatggagaggcgctgatcggcaaggacagcgatggcattcgctttgatgattttgacgttgaattaatgaagcaagcgttgtctagctttattgtcccgccggaagtgttgactgatcgattgatcgacttgatcaaaaaactcgcctttgtttaccaagttgagccgttaacaatggctaatttagttgagcaagcatctcgaggcgacatgttggatgaagacgacttacgtaaaacgatcaaagagtggtatcgtcttgaaaatggcacaaaaccgcctgcgcttggcttaaaaacacagccgcagacagcgcgaacgatgacgaaagagccgcaaacggaagaagaacggtcgatccaattttacgagcagacaccgccaatgacactcttggaaatgcgccaagaaggagcagcggtttctccagccgacgcccgcttgattgaagaactcatcgttgactataaattgcatccaggtgtggcgaacgtgctgattgattacgtcctattccaacacgatatgaaactttcccgcggctttatgttaaaaattgctggccattggaagcgaaaaaaagtaaaaacggtgccaggcgctatggggcttgtgaaggaagacaaacaaaaacaggccaatgcatcgctgcggcaaacgtataagcgaaacgcacgccaagacaaactaccaaagtggctaatggctgagcaagaaaagggaaatagtcaagaaagcaaacaagctagcggtgtggcggaagcaactgaatccaaaacaagcgcaagtcaaacagagtcaaaaaaacggattgctgcattaatggaggaacgaaaacgactaagggaaaaaaaggatgagggcgaatggaatcaatagaacaggcgctgaaagcttttgaccaggatgggcgcctgcaaaaacggattgagcgccaaaggcaggagctgctagatagcgcgattgtacaagcctttttgcaagaccatcctgatgtaacccgctcgatgatcgaccgtgcccttagcaaactatacgagtttaaaaaggaacgggggaactgccaaacttgccctgggttagaccattgtccgaatatgataaaagggtttcaaccggcgctttatacagagagaggcagcattgagatttcttatagccgatgccaactaaaacgggagcaagaggctgagcaagccaaactacagctaatccagtcgctttatattcctaaagatatccttaaagcaacatttgacgatatggaacaaaatgaggaacgggcagatgcgctaagtgaagggctcgaatttgctttatcagccaatccaggagaaaagggaaagggtctatacttatacgggaaatttggcgtaggaaagacctatttattaggagctatcgcaaatgaattaaaaacaaaaaacatccaatcctatttgatttatacacctgacttttttagggaaatgaagcaagccattggcgatgggtcctttcaagaaaagctggaagctgtccgaaaagcccctgttctgatgctagatgacattggagcagaaacaacaactgcttggacccgtgacgaagttttaggtcccattcttcaatacagaatggctgagaaactgccaacgttgtttacttcgaattacgattacgatgagttagaagagcagcttgcctattcggaaaaaggcgggatcgaacggctaaaagcaaaacggattatggaaaggatcaaacattttaccacattcgtagaagtgggcggacaaaatcggcgcagtatgtagcgccgatttttatattgtcgatttttcgacaacagcgctcaggcgggtagaagctgcttggcaagcgagtggaattgcggaaagtataggggttcacgagcgacgtatgtaaggttttagagcaatgcttggtcattggatgtttaaggataactatggtacgatgtatagagaatactagattacttgtgcttgggggtacaacaatgagcatagatgccatattagaacgggcagtaaacggcgagcgcatttcgatggccgatgccgttaagctttacgagagcgacgatctcgataaacttggcaaagcagctgatacgattatgaaaaaatggcaccctgagccaataacgacatttgtgatcggtcgcaatgtgaactacacgaacttttgcgatacatattgttcgttttgtgccttttaccgaccgcctaaccataaagacggctacgttcttgatgatgaagtcatttttcaaaaaatcaaggaaacacaagacgttggcgggacagaaatattaatgcagggcggaaccaaccctaacttaaagcttgattactatacaaacttgctaaaaggcattaaagaacgttttccagatatttggatgcattccttttcccctgcggaaatctggaaaatcgctgaagtgatggacatgtcgattgaagacgtgcttcgggaactccacaaagcggggcttgacagtatgcctggcggaggcgctgaaattttgacggaagagacacggatgcgcgtcagccgtttaaaagtgacagccgatcagtggcttgatgcgatgaaggcagcgaagaaagttggcatgtttggtacggccacaatggtcattggcttcggtgaatcgtttgaagaacgagccttgcatttgcaacgcgttcgtgatgcccaagacgaaacagaatgttttacggccttcatttcctggctgctacaaccggaaaatacagggttaagaaggctgaaaaaattaacgccagaagattatttgaaaaacgtagcgatttcaaggattttcctcgataatatcgccaatttccaatcttcctgggtgacaatgggccctgaagtcggcaaaaaatcgcttcattttggctgtaacgattttggtagcaccatgatggaagaaaatgtcgtatctgctgcaaatacgacacacaaagtcaattcaaatttgacgcttaaattgattcgcgaagctggaaaaataccagcccaacgtaacacaaaatatgagatattaagaacgttttccaatgacgaaaacgttgagaaagactttatcatgcaaaattgacccgattgctccggagcgactccggagcttttttgtatgcaattagcatgtttttgtgccaccaacataaattgataataagcctgtctggcttctagtgagctttaggtaaggttttgatatgttagggggagtcatgcgtgattgccattcattttgaagagcgcggcaactgctcgcgcctgtttgatgaattgaggggctatatggcaacctataagccatatggttttggcggggcagtggaaaaaaacagtgaagcgacgatcaccgtccgttatgaaaacaaagacgtcgatttttatgagtcgttccatccttttttggcctcgatctttgcggaatatgtcatagaaacaaaggaagatgaatggttaatggacattgctgaaaaccttttttactttaccgacgaagaggaaaagcagcaaattgtcgccattgcccaagcgattcttcaaggggatcggaatgatatcccatctgttaagccgcattttgatagacgtgcatttctatatgacgccttcgcctcacacctcaacccggatacgacattttattacgaaccatttctgacattccggctaaaagaatatggagaaatgttaattgattgtatcgagcttgcgattgacgaatatttaatggaacaagattaccaggcaatggttgaaaatttgcgccattatatccgtatcacacctgcacggttgccaatggtttacctcgttcacaaggacatgtttacgttttatgatgaacatttccgggagttgactgctgaagaaatggcttattatttaaagcaagaacttgtatttgaaacaggccttgatttttctgaaatggtcattagcccgctcgttagcatggctccagggcatgtccatgtatttacagatgaaccagaccatggggtcattttaacgattcaagcgatcttccaagaacggctgacgattttccctttgcaagaacgccattgaacgattacaacgaacaagcttgcatttttagctttgttttttgtataatggctgtatgaaaagtgatgataaggacaccgcattcaagtaaggcgttttttagagaatggggcataggctgggacccctaaacgcgactcgattgtgaccacctttgaactgccctggggaatgacagtatccagcgccggcccgcagccgttatctgtatgtagagcatgtaagtagggtggaaccacgaaaccacactcgtcccttcgattaaggggcgagtgttttttattttaatgcgaaaggaagatgaagtatgacggacaaacgaatgtttacgtttcctgatggaacggtaaaatcatttccaattggaacgacgactgaagcgattgctgcttctattagcccaggattaaagaaaaaagcattggctggaaaactaaacgggacattgtatgatttgaaaacgccacttcctgaagatgggaacattgaaattgtcgtcgcaggatcagacgaaggattagacatcatgaggcacagtacagcccatgtgcttgcccaagcagtcaagcgattgtttccaggtgttaagttaggtgtcgggcccgtgattgaggacggcttttactatgacatcgatgccgacgaatcgattacggcagaagatttgccgcggatcgaaaaagaaatgaaaaaaatcattggcgaaaatttagagatcctacgcgaagaagtgagccgtgaggaagcgattgcccgctttaaagaaataaatgacccttataaactagagttgatcgaagccattccagaggaagaaacagtcacgatttacaaacaaggcgaattttttgatttgtgtcgtggcgtccatgtgccatcaacgaataaaatcaaagagtttaagttactgtccactgcaggagcttactggcgcggcgacgcgaaaaacaaaatgttgcagcgtatttatggaacggcattctttaacaaagacgacctaaacgaacatttgcgcttgctcgaagaagcaaaagaacgagatcaccgcaagcttggcaaggaacttggtatctttgcgctttcacctaaagtaggacaagggttgcctttatggttgccaaaaggagcgacgattcgccgtatcattgagcgttacattgttgataaagaggagcgccttggctaccagcatgtttatacgccgatccttggttcctctgagctctataaaacgtctgggcactgggaccattaccaagacgacatgttcccaccgatggaaatggacaatgaaacgctagtgttgcggccgatgaactgcccccatcatatgatggtttacaagcaagacatgcgcagttaccggcaattgccgctgcgaattgctgaactgggcatgatgcaccgttacgaaatgtcaggcgctgtttctggacttcagcgcgttcgtggaatgacgttaaacgatgcccacattttttgccgccctgatcaaattaaagaggaattcgttcgcgttgtacgtcttattcaagaagtgtacaaggattttggcttaaacgactataagtttcgactatcgtaccgtgatccagaagacaaggaaaaatattttgatgacgatgacatgtggaacaaagcgcaagcgatgttaaaagaagcaatggatacattagggttgccatattatgaagcgattggtgaagccgctttttacgggcctaaattggatgtgcaagtaaaaacggcccttggcaaagaagagacgctttcgactgttcagcttgattttctccttcctgaacgctttgatttaacctatgtcggcgaagacggaaagctgcaccgcccggttgtcgttcaccgcggggttgtctcaacaatggagcgatttgttgctttcttgttagaagaatacaaaggtgcgctgccaacatggcttgcgcctgtccaagtacaagtgattcctgtatcgaatgaagtccacctggattacgccaaacgtgtcattgaacaactgcaacaagcaggtgtccgtgtcgagatcgacgaccgtgacgaaaagcttggctataaaatccgtgaagcgcaaatccaaaagatcccttatatgctcgttcttggcgacaaggaagtggcagctgaagcggtaaatgtccgtaagtatggggagcaagcctcttcttcgcaaccgctctctgtctttgtcgacgagattggcaaagaagcgagaaaataaaggctgcataaacgttccagctaggtcaagccgtggctggaacgtttatttcaatttggttacattgctttgaaaggcgcaaatgcttatgaatttatgctaagctagtggagaatttttagatttgtacgaaatggaggaatggcagtttgcatacagaagctttgaaatggggcattttagggacagcttcaattgcaaaacgagcaattatccctggaatcgctgcatccgcaagcggtgaagtggtagcaatagcgagccgttcacttgaaaaagcccaggcatttgcagctgagcatgacattaaaacagcgtatggttcttatgaggagctattggcagatgaggaaattgaagccgtttacattccgttgccaaaccacttgcataaggagtgggttataaaaactgccgaagccggaaagcatgtcctgtgcgaaaagccgattgctttacatgcagaggaagccgaggaaatgaaaggggcatgcgagcagcatcgtgtagtcctcgctgaagcttttatgtaccgttaccaagcacggtacaaagacatattagcccatatcgataatggcgacattggcgaaattcgcgggattcgtgctgtatttacgttcaataatgcaagcgctttcgataatttccgtatgaaacgagcatatggcggcggcggcctttatgacgtcggtgtctatccactttcattagcgcggttggtctttggcgaggaacccgaagcagtgacgatgcatagttttatgcctgattcccatgaccaagtcgatatggtagcagcagggttagttgaattttcgaatggccgctacctgacatttgattgtggaatgtgggccgcatttcgtgatgaagccgaaattattggtacaaaaggacggattactatcccaaccgcttttactaatgaagcaaatggatatgatttgtatacgaacgatggccacactcatttttgcggcaatgcagtggatcactatgcgttgcaggcagatgcgtttgccgcaacggtccgcaacgaaaagccgttgcctttttcagcagaagatgctgtgttaaacatgaaagtgctagacgcatgcttgaagtcacaacttgaacgaaaacgaatagaagtggagcggtgacaatgaaagcaatccctttcgaaggcataacaaagccagtatccgccctcataatgggcagtgactatttttctccagatcatcaagaggccgttaacaacattcttgagcagtatgtttcgatcggtggcaatacaattgatacagcatttatttacaatggcggcaaaagtgaggttgctattgggaactggcttgacgctggcaaccggtcgcgaatgaatgtgttaaccaaagggggccacccgaatgaaaagggccatacgattaataaacacgacattgccgaacaattaaaaattagcttagaccgtttgcaaacagatgcagttgaattgtatgcccttcaccgcgatgatccaacagtgccagtcggcgccattttagaatggcttaatgaacataaagaagcagggcggataggcgcgtttggtggttcaaattggtcgttaacaaggctggccgaagcgaacgaatatgccgaaaaacatgggcttgttggtttttctttctccagccccaatttaagtcttgccaaagcccaacagccttactggcctggctgcattagccttgaccaaacagcgattgaatggcacgtggaaacgaagctgcctgtgttctcgtggtcttcccaagcacgtggattttttactggccgcttttctcgggatgaccgaagcaatgaagatttggttcgtgtgttttacaatgacgacaattggcagcgctatgaccgggcagaagcgttaggaaaacaaaaaggggcaacgacaattgaggtcgctttagcctatgtcttaaaccaaccttttcctactgctgcgatcattggaccgcaaaatcagcaagaaatgcagtcttgtgcaaaaggggcagcattggcattaactgctgacgaagttgcttggctcgatttacaaaaataatgattggcatgtagaagttgttctttttatagagggcagcttcttttttaggtttattttaaagaaagtggaataaactgaacgtagcatcttaataggaggggaaacgagtgaaaaagaatgggcgtttagcattgttggcgattgtggtagtcttgcttgtatttcctcttacaacctcattccaggcaaaagaaaaaacgccacattttgcagatgaaattgctgcgctattggaacatgaacgtttggctggcgcatctgttgccgtgagtgtccgggacggcgctaccaatgaactgttgtttgaacacaatgggaacatgctgctccatccagcctcttcgatgaaagtgttaactgccgttgctgctttaacggagctaggctctgaccatacgttcaaaacgaccgtgtttacagacggcaaaataagcaaacgcgtcctccatggaaatgtatacataaaagggggtggcgaccctacactcatggaagcagaattaaatgagcttgcacaggaggtgcgcaacaaaggcatcaaaaaaataaatggcgatataattgccgatgaatcacgctatgacgacgtacggttatcccaagatttgaattggtcagatgaatcgttttatacaggggcgcaagtgtcagcattgactctttctccgacagacgactatgatgcaggaaccatcttggttgaagtgaccccgggaaaaaaagcaggccaaaaaccaattgtcacgacgcagcctgacgttaaagcagtgccgattataaatgaggcagtgacagtagcagctgaagaacagaaatcattaaaaatagaaagagaacatggcaaagcggacatccgcatcaccggcaatgtgcccattggggcaagcgcaacaagaagttgggtagctgtatgggagccggctcaatatacaactgctgtatttaagcaggctcttaacaatgcggggattgacataaaaaaggcggacgagacaatagggtacgtgcctaaaaaagcagtgaaacaagctgaacgagagtcgatgcctttgcatgaactgcttgtaccgtttttaaagcttagcaacaatggacatggagaagtgcttgtaaaagaaattggttatgtaaaagaaggagaagggagctgggatgcgggattgcctcttgtcgcagaaagcaccgagcagcttggggcaagcggtcctttattactgcgtgatggctcgggcatgtcccataagacgctcgttgcagcaaatgatttaacgagcgtgctctatcacgctcagcagcagcattggtttactgatttttacaatggtctaccagtggctggagaaaaagaacggcttgttggcggaacgttgcggaatcgtttaggcgggatagaaggggaagtgagagcgaaaacgggctcccttacaggggtatcaagcttaactggctatgcaaggacaaatgacggcgatagctatttgtttacgattatggtgaataatttcattggcgaaagccaaacgattcgacacattgaagatgagatcgtgttggcgattcttggcgaatcatcctaatgaatacgaggggcgcgcggctaaagaaagctgcgcgccttctgaccgtgcggtttgttttcaaacaactgcgttcgactaacgtgttcttgagaacgacgagattatccaacaaaaaattctaaagtttttataaagtgcctggtttttctagtatttagcagtataatagaaaaatagaagatgtaccgaatttctagttatcgaaggagaacgagagatggaacaattcaaggaggcacaccagcccgaagagttcgctttttcaaaaaagcctaatattttcgcctttctttttaacccaagtaaacagtttgtgcgcatgaaagtggaaccgtccgtcggctttccaatgtttatcatcctatgcctcgtcttacttggcttgctttttcccgtttttactggacaaggagggctaatcgacttagatgcggttgcctatgacggcgacatggatgggatgatgatggaagaaggaatctacatggaggatgctatgtatgaagaagaggcgccgctgtttgctagctttaacatagatggcctcgtttcaggaattataattggaatgattatgctggttgcttatgctgccggaccgcctctgcttgcgcttatcttgtttgcgatttcgaaaatgcaaaacaaccagacgccctataaggcaatttattcaatgactgtttttgccacactcgtaagcgccattggctttctgtatttgatgattgtcaatgcggcaaacggaacgtacggctatatttatacggcgccatctgtgtttgtcaatgaaacacacccattctattctctgttacaaagcttggaaatctctacgcttgcgtttgttgcttttatttcgctggggctcattaagacagccaacttcaaaaaattcccagcaattgcgattggggcgggcatatttgcattggtgttaattgtcaatttattaggggggcttttgcgttgagtatgaaaaaagcaatcattggtggagtggttgttgtatctattgccacatttacttattttggactatctaaagcccgtgaaacaggtggcggagaggcaggatacacggtcgatttggttacaccgatgaatgaagtaatggactccaaggtaatggttccggggaagttagagttagtcgatcgccagttagtgacagaactggctgaacatagcgggttcgaaatattagtcgatgtcggcgatgaagtcgaagaagggacgccgctcgtccaatatgaaacatctgagcttgattttgagcaacaggacgttgaactgcaaattgaaaaagccaatggggtgattgcggaactttcaaagcaagaagaggatgtgaagaagcgtaaaaatgggcctgatgtcaaaccgacctatgagacggacgaggagacaggtgaaaaaacggaaattgaaccggtcgtgaccgttgctgagcttgacgctgagttggctgagcttgccgcacagaaaaaagaagaagcgtttgaattgacgcggctaaaaaaccaattagaaagcattaaagagcaaaaagcacaattgaccgtgaaaagcaaaattgcaggaacggtcattaagagaaacgacacggcagaggaaagcaatgaaggcctcggtgaaagtgcgacaaatgcgttgcttgaagtggccgacacgagccaatttacgattacaggcaacatttccgagcagcaatccctcgaagtggagcctggccatcctgttatgattacatctgatactgtagaagatggtttttgggaaggggaagtagtcgatgtctcttatttcccaactgaaagcgatgaattttacggagaatcgtcgagctctcaatacccagttacaattaaaataaccgaaggcgatacggacaagctccgaccaggttaccaagtttatgctgaaattataacgatggaacacgaagggcttgctttgcctatggaagcgatccaatatgatgagttttcctcatttgtttatgtttatgaagatggtatcgctgtacgtagggacgttgaaattggaattgcaactgaatattcgatcgagattatagagggcgtgacagaagctgatgaggtcattctcgattacatgggagaagtgcaggatggcatgacggtcacgccagccgtttacgaagatggcgactttgaagaagggcttgacggggtcgatgaacagtttgaagaaggggaagaaccgttagaagcgccaattgacggagaagaaggcgaagtgattgaaggcggcgagattattgaagaggacgatgaggtatgattgtgctcaaacaggtgactaaatcgttccgcgttgggcaagcttggtcgcaagtgctagctcccatcgatttaacgattgaacaagaaagttttatgtcaatcatgggcccatctggttctggaaaatcgacgctaatgaatatcattggctgtcttgacaaaccgacaacaggcgaatatttgcttgatggccagatgatcggcacactaagcgaaaaagaacttgccaagatccgcaacgaaaaaatcgggtttgtgttccagcaatttcatttattgccacggctttcggcatggaaaaacgtcgaactgccgatggtatatgccggcatcaaaaaaagtgagcgaaaagagcgggcatatgaggcattgaaaaaagtgggcctcggcgaccgtgctacatacaagcctgcttccctttcaggcggtcaaaaacaacgagtcgccatcgccagggcgctagtcaacaatccgtcgattattttggcggacgagccaactggcgctctcgattcgaaaacgagcgagtcgattatggaattgctccgtggtttaaatgaagaaggggtaaccatttcgattattacgcacgaaacggaaattgcggaaaaaacagaccggactgtttttgtaaaggatggcaaaatccaggaggcaacagcatcctgataagctgcttgttttccggaaaggaacgaggcctgtgaacatcattgaaaacatcaaaatggcgtttcattcgattgctgcccaaaaattgcgggcgctattaacaacgcttggcattattatcggtgttgctgccgtcatcatggtggtagcaattgggcaaggtgctgaacaaaaattaaaagcacaaatcgtaggcgtagagaacattcgtgagatttatttcgagccatcggaattcgatgaacaggaaaatccgaacatttacgccttctggcagtactcggaacaagacgtaacagacattcaagcgttgccttccgttcaatcggtcgtcgcttctagtgccgaacacacgacgattttggcgggtgatgaaaaggttgaaacggaagttaacggaatcaacatgcactatatggatctttacgattatgaagctttagaagggaatttgcttcatccagtcgactatttaacgggaacgaggaaagccgtcattacatccgtgctggctgaacaactgtttccttacgagtctgctgtcgggcaaacggtaaaagttggcgcttatccgattgaaattgtcggcgtattagcgccgtctgacagcattattaactatgaaagggaacaattgttgcttccctatgaaacgtggaaacaaattttcttccgtgatggatttgactccatccatattaaggcggaaacagtcgaagacgttgaattggctgtagtggatgcagctgcgattttaaatgaaaaccacagcacagttgatgcctacaaaagctatgatatgagcgaatttatggaaacagattcaacgattacccgtgtcatgacgatcattattggtggcatcgctggcatttcgcttcttgtcggcggaattggtgtcatgaatattatgcttgtttcagtgacagaacgaacgagagaaattggtatccgtaagtcaatgggggccactagaggacaaatcctgtttcaatttttaattgaatcgattgtgttgaccgtgcttggtgggacagcaggcattttgctcggggcgctgctcgtacagctcatcggcaacgcatttgatatggaggtcgttttgtctggaacggttgtcttaattgcgactgctttctccctgggggtcggcatattgtttggcatattgccagccaataaagcggcgaagttagatccagttgaatcactccgatatgaataatgcaggcaaaattcagcaacgtgcattgacaggaaccattcaccatggtaagatacgtcttgtgttagttaatagagcaagaagaagcgcccgcttctcacctgtacgacattggttgccaggttagaaaccgtcagtttgttaaaatgctgattaagtgtgggtgccgtgcgtccacacttttttcacgtttagacgcgttaattgctttagctgcatcacaaaatccactggaggtggctcattattagcaaggacatgttggtcaatgaagggattcgggctcgtgaagtacgtctggttggcgccaacggcgaccaaatcggcgtcaagtcaaagcatgaagcactggaaatggcacaaagagtaaatcttgaccttgtctgtgtggcgccaaatgcaaaaccgcctgtttgccggattatggattacgggaaatatcgctatgaacagcaaaagaaagaaaaagaagcgcgcaaaaatcaaaaagttattacaatcaaagaagtacgtttaagtccgacgattgaagccaatgactttaatacaaagcttcgcaatgcccgtaaattcctagaaaaaggcgataaggtgaaagcatccattcgtttccgtggtcgtgcaattacgcactcacaaatcggacgtgacgtacttgaacgtctcgcaaaagaatgcgaggacatcgcaacgattgaggcccgcccaaaaatggaaggccgcagcatgtttctcgttatggcacctaaaaccgagaaataagggcaggaattagttaaaggaggacgtcgttatgcctaaaatgaaaacacaccgaggcgctgctaagcgttttaagaaaacaggaactggcaagcttaagcgctcacatgcttatacaagccatatgttccgccataaatcacagaaacaaaaacgcaaactccgcaaagcggcaattgtgcattctggagattttaaacgcattcatcaaatgctcacatacaagaaaaaataactgttcggatagattaaggagggatttgcgatgccaagagtaaaaggcggttatgtcgctcgtcgtcgtcgtaaaaaagtattaaaattagcaaaaggttactacggttcgaagcatacgctttttaaatcagcacaaggccaggtcatgaaatctttgcaatatgcataccgtgatcgccgtcagaagaaacgtgatttccgcaaactttggatcacgcgtatcaatgcagctgcacgcttaaatggcctgtcttatagccgtttaatgcatggcctgaagctagctgaaattaacgttaaccgcaaaatgcttgctgatctagcagttaacgatgaaaaagcatttgctcaacttgctgataaagcaaaagaaagcttaaatagctaaaaacacacgcagccaacgattacattggctgcttttttgtgtgttcgtcacgattttaagaatacgactgaaaacaacgttgttttatgagtaaagtctatttgcagaaagtttgtaattgacaatatggtagcgttttcatatgataatgacatactgataaacgtaggaggggaagcagtatgccacgaaaaaaaggcgaaacggagtatgagcgcataacgaaaagcgcatcctttgcggagctgatgaaaaagaaaaaagcgtttttagtgcctagtattctattttttatggtcttttacttttccttgccagtactcgccgtttataccactgttttggaaacgccggttattggcgaaatcacatgggcatgggtgcttgcaattgcgcaatttattatgacatggacgttttgcattttgtatgtaaaaaaatcagcgcggtttgataagctagctgaaaaggtagtaagcgagcaagacactgacaggaaagaaggggcgggtttatgaacattactgtcatttcactatttctagcgatcgttatactgacgcttgtcatcacttactatgcggcgaaacggacaaagacagcaagtgaattttacacagctggaggcggtttgactggctggcaaaacgggcttgcgattgcaggtgattacttgtctgcagcctcgtttctagggatagccggtgccattgctttgtttggctttgacgggttcttttacagtattggctatctagttgcctacttggttgtgatgtttgtggtggcagaaccacttcggaacttagggaaatatacgcttgctgacatgatccattctcgttttgatgcgaggaaagtccgtggtgttgctgcagggagcacgattacaatcgtgattttctacatgatcgcccaattggtgggggctggagcgctcattcaattgttgtttcaaattccatatacatacgctgtgctgttagtgggcgttatgatgaccatttatgtgttgtttggcggaatgacagcgacaagttgggtgcaaattgttaaggctacattgctaatggtcgcgactgcggcgatttcgatcatggtgttggtccggtttaactttaacctattagacatgtttgcctctgttggcgcttctcaagaagaagggttcctgcatcctggaatgcaagggagagctccccttgactccatttcgctcatgctcgctctcgttttagggacggcaggcttgccacatattctgatgcgcttttttaccgtaaaggatgcaaagacagcgcgtagttccgttgttactgcaacttggattgtcggaatcttttatattctaacgattttccttggattcggtgctgctgcatttgttggttctaccgatattatggctgccaatccagctggaaatatggcggctccattattagcagaacgtcttggtggcgatttgtttatgtcttttgtcgctgctgtcgcttttgccacgattctagcagttgtagcagggctcgtgctttcaggcgcttcggcgtttgcccacgatatttatgggcaaatcatcaaaaaaggaaaaattacggagaagcaacaagttgtggcagcgcgaatagcttcggttacagttgcgggtctatcgattgtgttggcgctgtttgcgcaaaatatgaatgtcgcctttctcgttgcccttgctttctgtgtggctgcaagcgccaacttgcctgttattgtttacactatctactggaaaaggttcaacacggctggtgccgtaacagcaatgttgtcaggcttgttctcagctttaatactcgttgcaatcagcccgaatgtgctatcgccgacaggcgatgcatttattacggcggaaccgcttattacattaacgaacccggccattatttctgttccgattggctttatcggcggcatagtagggacgttgttgtctaaaaaacgggacgatgccaaatacgcagaagtgaaagtgcgggccaacattggctaccgaaaagcggaatagatcgaggaatggaggtagtcgccatcctcaatctcacttgctagacgaggaaagggaagtagcgaatagaacttgacgtttgtgtcggaacaaagagctgcgaaaacacaacgtatgcgaacatgtgttgacagtacaggaggagcgctaatcctagcgctcctcaggctgttttgcttgtttcataaactctttaatcggtgatgcccattcaattgtcgcctctggataacgtaagaggacttcttcttcaataaaatggaagtcagaaaaagttaagccgcggagtctatctgtatctgcttttatataaacgcgaacgacttcaaatgattcctttgtcgcctctaaatacttctctccttcaaacataattcctttaaatgtgagttggaaatttttgcgcacattcgtgctatcgtccaaaaaataaaactgatgcgcgttctgggctttttttagctttcgttcaggctgcaatgtatattttattaaactataggaaatgacaacaatggtagctactatcagtagccggaagattaggacgagcacgggctaaaccccctttttggcataatggttttcaatatatacggctctacaacaaaaaaggtttcacttttattaataaaagtttctatttggcttttaaaaatttgttggctgctggtgttttcgctatactaggaaggaattcataaaaggagtggaacaatttggatcaacaattgcaaatgctaaaagcgctaactgatgcaaacggggtttccggttttgaaaaagaagcacgggacgtcatgaagtcatatattgctccttttgccgattctgtggaaacggaccatttgggcagtttgattgcaaaaaaaacgggcaatgccgatgggccaaaaattatggtcgctggccacttagatgaaattgggtttatggtgaaaagcattgatgaaaaaggatttgtgcgtttccaaaccatcggcggctggtggggccaagttttgctagccagccgtgtaacagtcatcacagacaacgggccgattcctggtgttatcggttctcaaccgccccacgtgctgtccccagaagcacggaaaaaaccagtcgagattgaggacatgtttatcgatattggcgccacatcaaaagaagaagcactagagtttggtgtcaagcctggtaacccgattgcgcctgtgtgcgaatttacagtgatgaaaaatgagaagttgttgatggccaaagcatgggataatcgtattggctgcgccatcgccattgacgtccttaaatcattacacgacgtcgaacaccccaatgttgtctacggagttggaacgatacaagaggaagtcggtttgcgtggggcaaaaacgagcgcacatgcgatacagccagacatcggctttgccattgatgttggtgttggcgcagatacgccgaatacgaagggcgaaggcacgcttggagctggcccgcaaattattttatacgacgcttcgatgattggccataaaaacctaagggattttgttgtgaaaacagcagaggaaaacaacattcctttccaatatgacaccattccaggaggagggaccgatgcaggcgccatccatttaactgccaatggcgttccggctttgtcgattacgattgcaactcgctacatccatacgcacgcaggtttacttcatcgagatgattacaacaacacggttaaactgctcgttgagttggttaaacggttggatggggaaacggttaaaaacatcacattcgcttaaaaacgggaggaacagaatgaataagttcgggaaatggtcattctttctcgcgattatttcgcttgtgttgtttattgcctttgcactcttgctcactacaggctatgcgttgcgacttttgccaagcacaacgagcgcggtcggcaccattgccgttgttgttctagtggcaagcgcaattgttagtttggtgtctcttgcaaaaggggagactggcaagtggaagcttgcaccgtggctcttaattggcgcaagtgtgctcatactcgctatcttgcttaatgtagtgtggatgagcggatgaatgtagaatattcaaaaatatcatcttgtgagctcattgcggacgatatctactccatataagaaaatgctaacatgaagcaaaaacaaaaaatggcgaaatcctcttaacccaaattggtcaattgggtgagcgaacataaagaagagtccatagacaattaagcagagtgcgattagagaaaatccccaacgtaaaatcattgccattggtcgctccttccactgtaatagtctagtgtatgggacagcacgcccgtttattatacaagctgctgtccttgactaaagcgattatgaaaaaagcgaacaggaaaatcctgctcgcttattcattaagccctttgctaatttcagcacaaagctcgtctttttgggattcatctgcatgtttccagtagacttcaaaaagcacgccaagtcccggcaacattttttcttcgccactttccatggcatcgacgattgttgcttcgacttcttgttgggaactgccttgtatattcgccataatcgcgttgcgcaaattaaagctcaatgaaataaccccctttaaaatggtgaatcgactagtagtattcccgaactaaggtggattataaatcgaaaacaagctattctgttagtaaatgtcgacaacagcataaaaaggggccattggtcatgaaacggatagaatcagtcaaaaatgaacgtattaaagcatggaaaaaattacatagcaaaaaaggacgtgaccagacaggacggtttttaatagaaggggaacatttagttgaagaagcgtggaaatcagattggaaagtagaaacggtgcttacgactgcagacgatgcaagcttatttcccggggaatgcataggcgtttctgaagccgtcatgaaggagttatcggaaacgaaaagccctcaaggcattgtagctgtatgtcaaaaaaaacagtggcataccccagaacggttgaaagggcggtttgttcttcttgaccgggttcaagacccaggcaatgtcggaacgattatccgcacggcattggctgctgatgcagcaggagttgttttaggcagtggttgtgctgatttatttaatgcaaaagtgatccgagcaacacaaggggcattgtttcatttacctgtttatatgggcgatctagttacctggatagaggcgctcaaagaaagtggtattccggtttacggaacatctttacaggatgctacgccacatgatcagttccactcccaagaacagtttgcgcttttgcttggaaatgaagggggaggcgtgcaaagccatttgttggatgctgctacggagaacctatttatccgccaaaaccggaaagcagaatcattaaacgtttctgtagctgccggtattttgctatttgccttgaaaagttaagcttgcagcttgtgtggcaattgattataataaaaagcaatcgtaattgtataggataaaaagcgttgatagagagtagtaagcttaaaaccgcctttcagggagggaatgccaaagactggaagcgtttctatggtaggatgggccgaattcactcttgagctggcatctctaaaagatgttcccggtttagagccgttatggacaatgaagttgcacttttttagcaagtgcaaacgaagggtggtaccacggagctttcgtccctttttagggagtagaaggctttttttattgtttaaaaggaaagaaaggatacaaggaggcattgccatgcgagaacagctaacggcattaaagcatgaggcgttggacaaagccgaggtagcgaaatcagagcaagatattcaagcgattcgcgttgcctatttagggaaaaaggggccgattaccgaagtccttcgcggcatggggaaattgtcagcggaagaacgcccaattattggtgccctcgccaatgaagtgcgtgatgaaatcaaaaacaaattggatgaaaaaagtaaaaaacttcaagaagctgcgattaaacagcagcttgaacaagaatcaatcgacgtgacgttgccaggtcgcccggcgcttcaaggcgcgattcacccattgactgcggttgtcacggaaatcgaagaaatctttttagggcttggtttttcgattggggaagggccagaaattgaaacggattattacaactttgaagcaatgaatttgccaaaagaccacccggcaagagatatgcaggattcgttttatgtaacagaggacttgttgttgcggacgcaaacatcgccagtccaggcgcggacaatggaaaaatttgcaggaaaaggcccagttaaagtcgttgttcctgggaaagtatttcgccgcgatgatgacgatgcaacccactcgcatcaattcatgcaagtggaagggctttatgttgataaaaaagtgcgtatgagcgacttgaaaggggtactcgaaacattcgcgaaacaattttttggccaagaccgttccattcgcctgcgcccaagtttcttcccgtttacggaaccatcagtggaagtcgatgtatcttgtggaatatgtagcggaaaaggttgccgagtatgcaaacaatctggttggattgaagtgcttggggcaggaatggttcacccccgtgtccttgaaatgagcggctttgatgccaatgagtatagcggctttgccttcggtatgggcgtagagcgtttggcaatgttgaaatatgatatagacgacatccgccaattttatgcaaatgatcttcggtttctaatgcaatttaaagacgtttaaggagggcgacacattgctcgtttcatataaatggctacaagaatatatagagattggtgatattagcccgcaagagattgctgagaaaatgacgcggagcggtatagaaattgactttattcacgaacggaataaaggggcaaccaatgtggttgtcggttatgtggctgaagtagcccctcatcctgatgcggacaagctaaatgtatgtcaagttgatattggcgaggaagaacgtgtccaaattgtttgcggggcgccgaatgttagctctggccagtatgtcgccgttgccaaagtaggggcgcgtttgcctggtggcatcaaaattaaaaaagcgaaattgcgcggacagcactccaacgggatgatttgctctttgcaagagctcggtattgacagcaaactagtgccaaaaggttatgttgacgggatttatgtattcccggaaacacaaagcgttgaacctggacaagatgcgttagcacttttcgagttaaacgatagtgtgctggaacttgatttaacaccgaatcgctctgattgcatgcatatgcttggcgttgcttatgagttggctgccctttatgatcggccaataaaaatgccgaaaaccaaagtgaaagaagtcatcgaatctgctgacggttatatcaatgtgagcgtcgaaaatggcgaagatacaccgttttatcaagcacttgtaataaaagacgttaaaatcgggccatcgccttcatggctgcaaaaccgtctcatggcagcaggtatccgtcctatcagcaacgtcgttgatgtcaccaactacgtgcttcttgaatatgggcaaccactgcatgcgtttgactaccatgcccttgcctcgaaatcaatccatgtgcgtcgcgcgaaagcagaagaggcgtttacgacactagatggcgagaagcggacactatcgcctgaacagttagtggtcacaaacgggcgcgaaccagtcgcgcttgctggtgtaatgggcggccttcattcagaggtaacagcggcgacaacgacggtcgtattagaggctgccgccttccatccgacagtggtcagacgctcagctcgtcttgctggcttacgcagtgactctagcgctcgattcgaaaaaggcattaatcaggaacgggtgtcagaggcagcacgacgagctgcttacttaatccaagaaatagctggcgggatcgtgctaagcggagcggccattgcggatgcgcgtgttcgctcggagagagtgattgcccttgatttggacaaaatgaatgagcgtattgggacaaatttgtccatcatggaagttgcggcactaatgagacgcctccagtttccgtgtgaaaaagttggctctgatctacatgtaaccgttccgcatcgccgcggcgatattacgattccagaggatttgtacgaagaagtggcacgcctttatggatatgacgagcttccttcaacattacctgttggcaacactacacaagggaagcggaccgctgaacaagcaaaacgtcggaaaatggaggcgtatttaagaagtgctggcctttctgaagcgatttcgtatgcgttaaccagttcggagaaagcagcgttgtttgctgcggaaacgattaagccgatccaagtggccatgccaatgagcgaagaacggagcacaatgcgtacaagtttgcttcctcatttatacgatatttgcacgtacaatttgaatcgaaaaaacaatgacgtcctcctgtatgaacgtggctcagtgtttttgagcgagcaagaaacgttgactgaactgcctacagaacaggaacgtcttgctgtcctattaagtgggacatatatgagccatccgtggcaaggtgagaaaaaagcagtcgacttttatgtgctaaaagggattgccgaaggtttaatggaaacgcttggtctaagtgaacaaattgaatacaaaccggatgtgcgcccaggcttccatccaggtcgtaccgccaatgtgttgctcaaaggcgagtcaattgggtttctagcccaagtccatccgagtacgcaaaaagcacttgatttaaatgagacatacgtgttggaattaaatgtcgatgcgctttttgccgctgagacagaggcgctcatatatagagggatccctcgctatccagcaattacccgcgatatggctctagttgtttcaaaagaaacgacggcagctgaattaatggcaataatccgtgaagctggcggagaattattagaaacagtttccattttcgatgtgtacgaaggtgagcatatggaaagcgggaagaaatcaatcgccttttctctcacttaccgccatgcggaacggacattaacggacgaagaagcatctttggcccatgaagggatagtggcagaagtgcaaaagcaaacgggtgccgtgttgcgggcataggttaaaatggaaagcaatagaacaatggagcgattgcatttagcaatcgctttttagcagtttccaattttgctttcgcatggtatgatgaacattagttttagggtagggcacaatcaatgtgcgctaggaggttctttcgtggagaagaacaataataaaaaaagagcaactgtccgtatacaaggacaaacttacaaagtggtgagcagtgaggaaccagctcatgtaaaagaagtagcctcctacatgaataaaaaaatggaggagctaaagaagcgtaatccgtatttggattcaacaaaactagctgttcttactgccttaaacattgctgatgaatacttaaaattgaaacgccaatacgaaggagaataacatggttagtgctgttattatgctgttgcttctagttggctttttaattggccggcgtagaggttttattttacaatttatccatctggttagcttttttgtagcgatatttgtcgcttggaattactatgagccccttgcccgtaccatccgtctctatattccatatccggaattttcggctgatggggcattcggcatgattatccaagcctttgacgcagaaagcgtctattattcagcgattgcatttgcgattttattttttgggacgaaaatcttgcttcatattattggatcaatgcttgattttgtttcccatttgccgatattgcatacactcaaccgcttgcttggcggcgtgctcggcttcgttgagttttatttgctgctgtttgtattgctttttgtagcaacagcattgcctataaacgaagtgcaatcggcgttgcaatcgtccgttgtcgcagaatttatgattaaccatacgccttatctgtctgattggttaaatgacttatgggtaaggccaacgttttaattggcagctcgctatagcgggctgctttttggctccacctagtttcggtgtgcgttttccgctggaaccactcgatttttgcggttgctgtttgcgtttgaagagcaaaagtcggtatgatagggaaggagcaagaaggagaggacgccgatggacaaaaaacaagcgatccaagtgttagaaactatcgcgacttacatggaaataaaaggggagaacccttttaaaatagctgcttaccggagggcagcccaggcattggaacaagacggccgcacgctagcggaaatagatgacccaacggcgattactggcatcggccaagcaacggccgatgtcatccaggaattaaaggaaacaggagcgtcatcgttgctgaatgaattggcacaacaattgccggcagggttattgccgcttctaacgattcctgggcttggtggcaaaaaggtcggcaagctttaccgagaacttggcattaccgacgcagaaagcttgcttcaggcagctaaagctgggcaaattcgcgcgcttgcaggatttggaaaaaaatcagaagacaacatgatcgaagcgcttgccgtttggaacgtgcggccagagcgccttcctgttgctgacgtgctgccgttttccgagcaacttgaacaacagattgctggcttcgacgatgtgatacgtttttctcgagcaggcagtttacgaagaatgcgggaaacggtcaaagacttagattatatcattgcgactgataacccatcttcggttaaggaccaaattttgcagcttgaagggattgccaacattattgcgaaaggaaatggcaaagtatctgttgaacttgaccttgaagaacatacgatttccgttgattttcgccttgtccctgatgaagcatttgcaacagcgctgcaccattttactggctccaaagaccacaacgtccgtatgcggcaactcgctaagaaacgtggcgaaaaaattaatgaatatggaattgaaacggtcgagacaggcgcaattcaaacatttcccgatgagcgagctttttttgcccattttggcttgccttatatttcaccggaggcaagagaagatggcagtgaactagaacgctaccgcgagacggcagaagaggtttctttcatcgatgcgaaagcggatttgcatatgcatacgacgtggagcgatggcgcccattcgcttgaagaaatggcggaagcagcaaagaagcgtggttatacccatattgccattactgaccattcccgctttctaaaagtagccaacggcttatcgattgaacgcttaaaacaacaacatgaatacatcaggaagtacaatcaacaaaataacggaattacgatattaacaggaattgagatggacattctccctaatggggagcttgattatccagacgagctgttaagagaaatcgattttgtaatcgcctcgatccactctgctttttcgcaaagtgaggagaaactaatggaacgattgcaagcagcgattttcaacccccatgtggacctggttgctcatccaacaggccggcttattggcaagcgcaaaggctatgccgttgatgtgcccacactaattcaatgggcgagtgaagctggttgcgcactcgaattgaatgcaagtccgaggcgtctggatttagaagtcccatggttaaagttagcagcagaaacaggcgtgccgatcgccatcaattcagacgcacatcgaatcggtacgctggcaaatgttgaatatggctatgctcatgcaagaaaagcgatgttgttgcctgaccaagtgttgaatacttggccattggaaaaattgcagcaatggcttaaacgcaagcattagctttgaataaaggaggttgcacgatggaacgtgtgcagcgcgttttagaatacaacaaaatgaaacagcaactgcttgaacatgttgcttcatcccttggcaggcagaaagtcaacgagcttgtcccttctacgtctttagaagaagtccgctatctccaagatgaaacagctgaagcagcaaatgttttacggttaaagggacatgtccctcttggaggcatttcagatgtccgccctcatattaagcgtgcagcgattggcggagtgttgtcggcaactgaattgattgaaattgcttcgacattatatggtggaaaaagggtgaagcagtttatcgaaacgatcattgaagacggtcatatcgaagtgccgattttagcagggcatgtagagcaaatggagcccctttcaccaattgaaaaagccattaaacaatgcattgatgataacggctatgtccttgactcagctagtacgagtttacggacagtgcggcatcaaatccgcagctatgaatccgggatcaagtccaagcttgaccagttaacccgttcgtccaatacacggaaaatgttgtctgatgcaattgtaaccattcgtagtgaccgttacgtgctccctgttaaacaagaatacagggggacatttggcggcatcgtccatgaccaatcatcctctggggcgacgctgtttattgaaccggcagcgattgtgacgctaaacaaccaattaacagaagccaaggcaaaagaaaagcgggaaattgaacggattttgagagaactgtcggcaaaagtagcagaggaaagcgagcagctgctccttaatgtcgataagctggcgcaactggatttcatatgtgcgaaagcctattatgccaaagctgttaaggcagtgaagccaacgttaaatgaccgtgggtatttggatttgcggcaagcgcgtcacccccttttgcctccagacaaagtcgtaccgagtgatatggcgatcggcgaccaggtccgttcgctagttattactggaccaaatacaggtggcaagacggttacgctgaaaacgattgggttgctgacgttaatggcccagtctggtctgtttgttcctgctgctgaagaaacggagcttgccgtttttgaacatatttttgccgacattggcgacgagcagtccatagaacagagcttgagcacattttcgtcccatatgaaaaacattgtctcgattttaaatgaaatgaatgaaaatagcctcatattgtttgacgagctaggagcaggaacagacccaactgaaggggcagcattagccatttcaatattagaccatgtctataaacggggagcgcttgctgtggcaactacccattatagcgagttgaaaggctatgcctacaaccgcgaaggcgccttaaatgcgagtgttgaatttgatgtcgagacgctgcggccaacgtatcgcttgcttgtcggcgtccctgggcgcagcaatgcgtttgcgatttcaaggcgcctcggactagacgaacgcattatcgatcaggccaaactgcaaattgacagcgatgcgtcccaagtagaaaaaatgattgcttccctggaagatagccaaaaatcagcacaaagcgaatggagccgagcggaggcggtccgccgtgaagcggaagcattaaaacgagacttggaaaaacggatggcttctttcgaagaaatgaaagaagcggctttgcaaaaagccgaacagaaggcggaaaaagtagttgctgccgcacaagaaaatgcagaattgatcatttccgagctgcgcgatttgcaaaagcaaggggtagctgtaaaagagcaccagctcattgaagcgcggaaacaactggaggaagcggcgccaaaacttgtctctaaaaagcgcaagcaagtaaaaaagcaggcagaaaaggcgaaacgtctgccagagccaggcgacgaagtcaaagtgttaagttttaaccaaaaaggcacagtcgtgaaaaaaataggcgataatgagtaccaagtacagctgggcattatgaaaatggccgtccctattgatgacattcaattgcttgaacaggagcggcgccagccagaaaaagcaattacgacgatacgtggaaatgatgcacacgtcaaagcagagctcgaccttcgtggggaacggtatgaagacgcgatgcgccgagtcgaaaaatacattgacgatgcgttgcttgctggataccatcaagtctcgattattcatggaaaagggacaggcgccttgcgcaaaggcgtgaaacagttcgttgccaaccatccacgtgttaaatctgcccgtgacggcggcatgaatgaaggcggacttggcaatacagtaatcgagcttaaatagaaaggagctagacatggacgttctccttcaaaatgaatggattcaaaccgtagcaaactacagtgtaacgatcttaatgctagtcgtctttcttgccgtttttgaaacagtgacgcgctataataactgggaagagatcaaaagaggcaacgtggccgttgccatggctacaggcgggaaaattgtcgggacagcaaacatttttgctgcgacgatccagcatgccgatggtttactagttatgctgatgtggggaatttttgggtttgcgttattgttatttagctactttatttttgaatttctaacaccaggtttcaaggtcgacgaggaaatcaaaaacgacaaccgcgcagttggcttgctgtcactgctgctgtctgtcggcctttcgtttgtcattagtgcaagtataaccgcttagagaataggttgtgagtgcatggaacggttgatacgaattttatacattagttgtggattatttgccattgctggaatcgtgttcttaattttatacgcatagcattaaggagcgtttccctctcgctgggggaggcgcttttgccattcgcaagaaatgatcgcttggcataaatgtgcaaaaaaagaaaaaaacatttgaaatcatgtaagcgattacaatacaatgaaagagaggagaatttcttgcgaaaggggcctttataaggaggagaaccatggcgagcgatgaaaaaaggtggtttcagcattatccgaagcaagtccgcccctttttggactatgaggatgtgccgttgcagcattttttcaagcaatcagctaacaggtttccgcaacacgaggcgatccacttcttagggaaaacattaagctacgaggaattgtatgaccagacgctccggtttgcgaatcgactgcaaaaactgggcgtgaaaaaaggcgaccgtgtggcaattatgctcgccaatagcccccaatcggtgattggttactatgcggtgctcatggtagggggcgtcgtcgttcaaacgaacccactctatgtcgaaagggaactggagcaccagctcgcagacgcgagggcaaaagtcattttgtgcctggattcggtcttgcctaaagttgaaaaggtgatggcgcgtacgtcacttgaattggtgattgtgacgagcatcgctgaataccttcctttccccaaaaatatgctctttccctttgtgcaaaaaaagcaagggattccaaaagtgaaagtgacgtattcggagcgggtattgccgtttgctcggcttgtaaaagagggagaagcgttggagcctgaagttgaaatgaacgcagacgatttggcgttgctccaatatactggagggacaacggggcttgccaaaggcgtaatgctcacacatcggaatttggtggtcaacgcagtgcaatgtgacgcttggctttacaaaacagaagagagaagtgaacgggtgcttggcgtcatgccatttttccatgtgtacgggatgacgacagtgatgaatttcgcggttaaaacggcagcgacaatggtgctattgccgaaattcaagccagaagaagtattaagaacgattgaaaagcaaagaattacacttttccctggagcgccaacgatgtatgtagccctcgtaaacaatgaacgtattcatcaatacgatttgacttcgataaaagcgtgcattagcggtgcttccgccttgccccttgaagtacagcaaaagttcgaagcacaaacgaagggcagaatcgtagaaggatacgggttaactgagacgtcgccagttgtctgtgccaatccgatctgggaaaagcggaaaacgggcagtgtcggcattccttggccagacacagatgtaatggtgtattcacttgaaaaagacggggaagcagaaattggcgaggttggcgaactgtttgtccgcggcccacaagtgatgaaaggatattggatgagacctgaagaaacggcgcaaacgtttcatggcgagtggctaaaaacaggagatatggcccgtatggatgaagagggttatgtgtatatcgttgatcgaaaaaaagaaattattattgcagggggatttaatatttatccccgtgaagtagaagaagtgttgtttgaacatgaagcggttgtccaagcagccgtaattggtgttcctgacgagtatcggggcgaaacggtgaaagcgtttattgtgttaaaagcaggagaaacgatatctgaaaaagagatggaagcgtactgtcgacaaaaattggccgcttataaaattccacgactgtatgaatttagggatgagctgccaacaacgctaacagggaaaattttaaaacgggtgctcattagtgaagaacaagcacgcaaggaagaacaagcgcagcaggaagcataaagggaaggtttctttacatgcgcccatgtagagaaacctttttaagcgccgttatcatttgacaatcgccctttcccgtactatactaaataacatgaatgaacattcattcatgttacggagttaaggagagatggttttgagtaaaaagagaggtcaaaagtatgaccaaatcattgatgcagcggtcatagtgatcgccaagcacggtttccatcaagcgcaagtatcaaaaatagcaaaagaagcgggcgttgccgatggaacaatttatttgtattttaaaaacaaggaagacttgctcgtatcgctatttgacaagaagctaggcgcttttgtcgaaaaaagcaggagaagattggccaaggaacactcaatagaagcgaaattccgccttttagttgaatctcatttctcacagctagaagacaattacgatcttgcagtggtgacacagcttgaattgcgccaatctaaatcggaattacgccaacgaatcaatcaagttttaaaaggatatttgacacttttagatgaattaatagcagaagggaaagcagaaggttgctttcaccctgaactggacccgcttttagcaagacaaatggtatttggcgttatggatgaagtagtctccaattgggtcatggcagaaggcaagtttccgttgaagaaacaagctgaaaatgtctatcatttgctcctccacgggttgcgagggaagtaacgtttgagcgcaaggtgactgcaacaccgataacgactacgttttgacttgcttgaaaaggggcaattgctcttattataggtttacagtaaaggaggactactagtggaaaacataacatggaaagtcacagacggcatcgcagagatcgggttaaagcggccccctgccaatgcgcttgcacggtctgtgatcgaagagctgagcgaagtttttgaaaacgtatacaacgatgatgcaattaaagtggcaatcatttacggagaaggccgtttttttgcggcaggggcagatattaaagaatttacagaagtaggcgacagcgaagagtttgcccaacttggcaaaaaagggcaagatacgttcaataaaattgaagcagctccgaagcccgttatcgctgctatccatggcgccgcgctcggcggcggacttgaactagctatggcttgccatattcgtctggcggcaccagagacaaaactgggcttgccagaactgaacctcgggttgatcccaggctttggcgggacgcaaaggttgccacggcttgttggccagccgaaagcgttggaaatgatgctgacaagcgctcctattacggccgaagaggcgcttaacgttggacttgtgaataaagtgtgcgatgaagatcatctgctggaggaagcaagggcaatggcaaggacgattgctgcgaagagcccgttaacggtcaagcgcgtattggagcttacgaaaatgagcgaaggcgctctgaaggaaggcttagataaggagatcgcttatttttctgaagtttatcagaaagaggatcgcatagaaggcgtcaatgcttttattgaaaagcgcaagcctgtttttcgcggcaaatagtcactacgagtttataggaggaattcccatgaatattttcgttgtgttaaaaagaacatttgatacagaggaagccattaccattcaaaacggtaaagtccaagaagagggcgccgagtttattattaacccgtatgatgagtatgctgtcgaagaagcccttgtgctgaaagaagcacatggcggagagatcacagtcgtcacagttggagaagaggaagcagaaaagcaacttcgtacagcattggcaatgggagcagacaaagctgttttgattgatagagaagagcttgaagagagcgatcctgcaacaacagcagcgctattgtatgcctactttaaggacaaagaagtcgacattattttggctggcaatgtagcggttgacggcggttcaggccaggttggcccacggcttgccgaattgcttggcatcgcccaagtgacgacgattaccgggctttctattgaggggcaaaccgctcatattgttcgtgatgtcgaaggggacgaagaaaaactggaagtgaagctgccgctccttgtcactgcccaacaaggcttaaacgaccctcggtatccgtcgcttccaggaattatgaaagcgaagaagaagccacttgaggtgcttgatttagacgatttagatgtagaggaagaagacgtagcggcaaaaaccacggtagttgatgtctatttgccgcctgaaaagcaagcaggcaaaaagctagaaggagagccatctcagcaagtgaaagaactcgtctcgttgttaaaaacagaagcaaaagtgctttaagggggagaggaatatggcgaaaaaaataattgtcttggcagaagcgaaaaacaatgagctacgaaatgtgtcatttgaagcgattgctgctgcaaaagagcttgcggatggcggcgaagtgacagccgttcttgctggggaggcgattgcaagtcttggcgaacagttatttcaatacggagcagaccgggttattgtcgtggaacaccctgagctagcaaattacacaacagacgcatataaacaagcgtatttgcaagtgtttgacaaagaaaatccagacattgtcgttcttggccacacttcagttggcaaagacctatcgccgcgtttggctgttaaactggatggagcgctcttttctgatgtcgttgcaatcgaggcaggcgacacgcctgtatttacacggccaatctactcagggaaggcatttgaaaagcgcaaagctgttgaggaagggccttacatcgtcacaatccggccgaacaacattgctgctttagctaaagaggaaagcgcttctggtgaagtggaaacacactctgttgacatccaagatttgcgcgcgatcgtgaaagatgtggtcaaaaaagcgactggcggcgtcgatttgtctgaggccaatattattgtagctggcggcaggggtgtgaaaagcgcagatggctttaagccactgcaagagcttgcggaccttcttggcggggcagtcggagcttcccgcggagcctgtgacgccgaatattgtgattactcattacaaattggccagacaggcaaagtcgtcacaccagacttatacattgccgtcggcctatcaggagcgatccagcatttagcagggatgtccaactcgaaagtgattgtagccattaacaaagacccagaagcccctattttcgaagttgctgattatggtattgtcggtgatttgtttgaagtggtgccccttcttacagaagaattaaaagccgtgcttgtctctaaataacaacagctacttgcgctagcgggtagcacccatgacggcagaagccgactagaagccagtctttcgccttatgctgcttgcgtgagcaagtggctttctattttggaaaaaatcgtttatgattagtcgacagtgggtaatctattccagagaagcagcatatttttctacatgcttacggaatggtatactgtaaatatgttatcaatgaaaggggatttggcaaatggcaattgtcaatgcgactgaccaaaacttcacggaggaaacaaaggaaggcctcgttcttgtagatttttgggctccttggtgtggaccatgcaaaatgatcgctccagtattagaagagctcgacggtgatcttggcgataaggcgaaaatcgtaaaagtcgatgtcgacgaaaaccaagaaaccgcagggaaatttggagttatgagcattccaacgctgcttgttttaaaagacggcgaagtggttgacaaagcggtcggcttccaaccgaaagaagcattggaagagctgttgaataaacaaatgtaatcctagcagtccgcctttcttaaaaaaggcggactttttacaggaggaggaacgattgaacgaaaccattaccaataagttggctctcttgcctgacaagcctggttgctatttgatgaaagaccgccaagggacgattatttatgttggtaaggcaaaagtgttaaaaaacagagtgcgctcctactttacggggagccacgatagcaaaacacaacgccttgttggagaaatttgcgattttgagtacatcgtcacttccagtaacatcgaagcattgattttagagcttacactgattaaaaagcatgatcccaaatacaatgtgttgttaaaagacgacaaaacgtatccgtatattaaaatcacgaatgagcgtcaccctcgtttattaattacgcggaaagtgaaaaaagacggggcaaagtactttggcccttatccaaatgcaggcgcggctacggagacgaaaaaactgttagaccgcctgtatccattgcgtaaatgccggaaaatgccggactccgtttgtttgtattaccacatcggccaatgtcttgctccttgcgtatacgaagtgagtgaagaaaccaaccaaactatggtgaatgagatcacaaagtttttgaaaaatggtcatagcgatataaaagagcaacttcgcgaacgaatggaaaaagcggccgaagacctcgactttgaacgggctaaagaattaagggatacgattgcacaaatggaaaaagtaatggaaaagcaaaaaatggcgtttgctgacaaaacggacagggacgtatttggcttttcctatgataaaggatggatgtgcgtccaagtattctttattcgccaaggccgcctcattgaacgggacgtgtccattttccccttttaccaggaggcaagcgaagagctgttaacatttattgcccggttttatttagaaaaaaaccatattaagccaaaagaaatttttgttgctgaaagcgtcgataaacaattgctggaagagttgcttgagacgcgcgtcacacagccgaaacgaggccaaaaaaaagcgttgcttgatttagctgaagaaaacgctgctctcgctttaaaagagaaattttcgctcattgaacgtgatgaacagagaacggtgaaagcagtcgaacgtctcggggaggcaatcggaataaatgcgccttaccggatcgaggcatttgacaattcgaacattcaaggcgttgacccagtatctgctatggttgtttttgtaaacggcgtgccgcagcgaaaagagtaccgaaagtataaaatcaaaacggtagagggccctgatgattatggatcgatgcgtgaagtcgtgcgtcgccgctacgtccgccttttaaaggaaaaacggccattgcctgatttgattgtcattgatgggggcgccgggcaaattgctgcagctaaagaagtgattgaagacgagcttggccaagctatccctgtctgcggtttggctaaagatgataaacaccggacgtcgcaattattaatggggtctcctccggtagtcgtgcctttacagcgtgacagccatgaattttatttgttgcaacgcatccaagatgaagtgcaccgttttgcgatcacattccatcgccaaacacgggcgaaatcgtttttgcaatcagcacttgacgacatccctggcgtaggggagaaacggagaaaagcgcttcttaaaacgttcggttcagtaaaaaaaatcaaggaagcttccattgaggacttaagcaaacacgtgccaaccaaactggcagaaaccattcatcacacattaaacaaaaacaagccgaatgcttaacggcttgttttttagtgccctcctgttagtcgcctacgttgacagtatcatttcggtcaaaatgcaccgtaaaaatcgtgctgtttcgtttttgcgtatatgtaacggccgttgttacctcatgccacacttcaaatgtttccgctaaaaagccagcctcaagctggtaacagcgcctatcttttcgtcccatccaatctcctgttagttcaaaaatgtattcgctccgtttttcttttagacgctggagttgcccccattcggcacgttgaaaaaacgaaattaattcttcaacggattcaagtgggttgtcgcgcgcgacttttttgcctacccaataaagcaatctgtcgtgctcgtctccgagaatcgtgcgcaggatatcattacggattaaatcatagccatattgccctgctgtttgctccttgttgtcttccccgctcattgtcacacctcaacctttcgatagctttccatgttcctatactacctgtgattagcgattttgtcagtagttcttctgtctaatttttcacggcaaatggaacctaggcgatatagtaaaggagcccagacagtgatatactaactggtgataaatgagaggtgtgccatggacaataagcatgcacggttaagcaattcattccaaattattattactgcctatttgctgacgatttttttgtttagtctgcttttaatgattccctggtttcatcaagacggcgtaacgcttgcctatcgcgattctttgtttacagcggttagtgccgtcagtgtaacggggctaacgacaatatctgttgccgacacgtttaatggaacgggcattatggtgctttcccttgcgattcagttaggcggcattggcattatgacactcggaacattcacttggatcgtattaggaaagcgaataaaccttgcccagcgcatgcttatcatcgccgaccaaaatcgcgtccaaaaccatatgagtggccttgttttgctcatgaggcagcttttgctacttgcgcttgcgatcgagtgtgttggagggcttgtactcggtacttattatttgcgctactttgacacatggacggaggcttatgttcaaggattttttgctgcgttgagtgcgtttactaacgctggctttgacctcaccgggcaatcactccaaccgtttgccggcgacgcagttgtccagcttgtgatgatcttgttgatcatagccggctcgattgggtttcctgttcttgtagagtgcagggagtttttgttaaagcggaaagccggattccgtttcagcttgtttacaaaattgaccgtttccacttattttctcgttttcgccattggggcacttggcatttggctgttcgagtcgtttggagcttttgctggcttgccttggtttgaacagtttggccattccttgttccaatcggccacaacaagaagtgccgggttatcaacaatagatataagtcaatttgagcagtcgacgctgctatttatgtcgggactgatgattatcggagcgagcccttcaagcgttggcggcgggatacggacgactacccttgctgtaatggttttgacaatcaggggctacgctttagggcgcaaccgcgtaaatgcatttgggcggcaaatccataaagatgaccaggaaaaggcgtttatcgttttgtctgttgcagcattgctcattgccgtttctttaattagcatcgctttttttgaacgagacagcggcatacgtttacttgctttaattgtggaagtcgcctctgcctttgggacttgcggcctaacaatgggggagactggctccctttcctatccaagccaaatcattttaatgtgcttaatgtttattggcagagtagggattgtcgctatgctgttctcctttaaaaagaaacatacgaaaagccattaccattatccgacagaaccagtcattatcggctagcgccaagcagccgatttctgtcggtttatgtagaaagaacattcaaaaccctttaaaatcaagatgaattgaatccgttttcttgactcggattttccctaggagtaaaatgaaactgtcaaatagatttcacagtttcagtttttcaatgaaagtcattcataatccatatcagggggtacgtttataagagagagaaaaacgcacgaatttgtataaggggtcttgatgaggaaaaatatcgtggagggaacgtgtatggctgagaatcgagagtactttaatcgtaggcttcattcattgctaggagttataccaattggaatttttctaattcagcatttaatagtcaaccactttgcaacaagaggaccggaagcatttaaccaggcagcccattttatggagagtctgccctttcgttatgcgttagaattgctcatcatttttattccgattctttatcacgcgatttatggcatttacattgcgatgcaagcaaaaaacaatacgagccgctttggcacattccgaaattggatgttccgcatccaacggtggacaggggtttttctcttaattttcatttcttggcatgtttgggacacgcggatccaagcgctgtttggtcatgaagtcaactacgatatgatggcaaatattttgcaaaacccttggatgatggcattttacatagtcggcattgtgtctgcgacgttccactttgccaatggactatggtcattcgctgtatcatggggcatcaccgtaacacctcgttcacaacaaattatgacatatgtatcaattatcgtttttgcagcacttacctatgtaggtgtttccgctgcatttgctttcgtataaaaatcagcaactagcgaattttttagggagtggactttatgagtaaagggaaaattgttgtagtaggcggcgggttagccgggctaatggcaacgattaaagcggcagaaaaaggggtaccggtcgatttgttttcgattgtaccggtgaaacgttcccactccgtatgcgcgcaaggcggcataaacggcgctgtcaacacaaaaggagaaggggattccccttacgaacattttgatgatactgtgtacggtggcgactttttagcgaaccagccacctgttaaagcaatgaccgaagcagctccggcgattattcatttaatggatcgcatgggcgttatgtttaaccgtacccctgaagggctcctcgatttccgtcgttttggcggtacacaacaccatcgcaccgcttttgctggggccacgactggacagcagcttttgtatgcactggacgaacaagtacgccgttacgaagtgcaagggcttgtaacgaaatacgaaggctgggagtttttatctgctgtgatcgacgatgagggcgcgtgccgtggcattacagcacaagagctgaattcagcagaaatacgcagtttctcagctgacgccgttattatggcaactggtggaccaggaatcatttttggcaaatcgacgaattcaatgattaataccggcttcgctgcagcaaaattgtacgaacaaggcgttgcctatgcgaacggcgagtttatccaaatccacccgactgcaattccaggcgacgacaagcttcgcctgatgagcgagtctgcccgtggagaaggtgggcgcgtatggacatacaaagacggaaaaccgtggtattttcttgaagagaaatacccggcgtatggtaaccttgtcccgcgtgacattgctacaagggaaattttccatgtgtgtgtagacgaaaagcttggcattaatggcgaaaacatggtctatttggatttatcccataaggatccaaaagaattagatattaagcttggcggcattattgaaatctatgaaaagttcacaggcgatgatccgcggaaagtgccgatgaaaatcttccctgctgttcattactcgatgggcggcatgtgggtagactatgatcaaatgacgaatattcctggtttatttgccgccggcgaatgcgattattctcagcatggtgcaaaccgcttaggtgcaaactcgctgttatcggccatttatggcggtatggttgctgggccgaaggcagtggagtacattagtggattgaacacagctactgaagatttgtcgtcttcgctatttgaagcgcaagtgaaaaaagagcaagaccaattcgacgcgattttgcgcatggatggtacggaaaatgcgtatgtccttcataaagagcttggcgagtggatgacggacaacgtcacagttgtgcgttacaatgacaagctgttaaaaacagatgaaaagatccaggagttaatggaacgttaccaaaacattaacatccatgatacggctaaatggtcgaaccaaggagcggcatttacgcgccagcttgggggaatgctcaatctagcccgtgtgatcacgcttggcgcttaccaccgcaatgaaagccgtggcgcccattacaagccggagtttccagaacgaaacgacgaagagtttttgaaaacaacaaaagcttggtacaatccgagcaccggcgcgccggactttgaatatgaggaagtcgacacatcgttgattcaaccacgcaaacgcgactactcacagaaaaagcaaggagctggaagcaaatgagtgaaaaaacaattcgccttatcgtgacaaggcaagatggaccagacagcggctcctatgaagaagagtttgctatcccttaccggcaaaacttgaatgtgatttcttgcttaatggaaattcgccgcaaccctgtcaatgttaagggtgagaagacaacgcctgtcacgtgggatatgaactgcctagaagaagtatgtggcgcttgttcaatggttattaatggcaaaccacaacagtcgtgcaccgcgctcgttgataagttggaacagcccattcggcttgagccaatgaggacattccctgttgttcgtgatcttgtcgtcgaccgcagcagaatgtttgattctctgaaaaaagtaaaagcttggattccaattgacggcacgtatgatttaggtcctggaccgcgcatgccagaaaaaagacgccaatgggcttatgagctgtctaaatgtatgacttgcggcgtctgcttagaatcttgcccgaacgtcaattcaaaatctgaatttattgggccagcagcactatctcaagttcgcctctttaatgcccacccaactggtgaaatgaataaagaagaacggttggctacgattatgacagacggcggtcttgccaattgtggaaactcacaaaactgcgtgcaagcttgcccgaaaggcattccgcttacaacatccattgctgcattaaaccgcgcgacggcattgcagtcctttaaaaacttctttggaagcatatgatcatacaacgaggctgcgaagcagcctcgttcaactatagacaaacgccgcttacgtcaatcccatttctatttccattttcctctccattattcccgtctactaagccttttcaattaagctgagatttgtcaaaaaaaggagcgatgaacgatgaaagtgcctgcttatatcaatgaaataagcgcatgggaagactcatttacattttttgttcccatcaaagtccgcttttcggaaacagatgcatttggccatgtgaataatacgtctgcgtttatttattttgaacacgcaaggcttgaattttttgagtcttgcggcttaatggaagattgggccgcgattagcaatgatgccattgtcgttactgctgatttgcaatgtaattatgtggcccaaattcaatacggggatacgttacaagtaggggtaaaagtggataaaatcgggcgttcttcattggacattcattatgtagcaaaaagaaacactgatatttgtttaacagggagaggcacagtggtgcaagttgacaaacagacaggcaaagcactccctttctctgagaagatgcttgctaaactagcatgtaaaaaaactacatagcaaaaagcctgcatagcaggcttttttcaaatggtcaattcacctagacgtataagttcgataacggcttgagagcgcccctttactcccagcttctgcattgtgttcgaaatatggttgcgtacggtcttttcactaataaaaaggtgattagcaatttcttttgttgtttggtcttggacgagtagttcgaatacttcgcgttcccttttcgtaagcaaaggttttggtccgaagtctgctcccttcaatatgttcactccttcatgccgggctaagagcaggtcaacgctgacctgaaaggctttagtcaagacagtatatgttgtgtatgaaaaaggtgtgagcgttcatttgcgaataggacgttttcattattgtcgaatttagtcgtttttttgatagggcccttgtttttttgttgaaagggattaccccccatgctataatgacgatgtttataaagctcttttataagagggttttgcagctgaataaagtgcattgcttagcaaaaaagaaaaataaattggctagagcagctcattgcagggtacgatacttagtaagaatcagtcgtgatttgtgcaaaggcgacccgctgtacaagggctttaccaatgagtaaatactaatagaaaagaggaattactatggctgaaaaaacatttaaaattactgcagaaacgggcattcacgcgcgtccagctacacagcttgttaataaagctggccaattctcgtctgatatcactttggaatacaaagggaaatcagtcaatcttaaatcgatcatgggtgtcatgtctcttggtgttggacaaggcgcagaagtaacaatcaaagcggaaggttcagacgcagatgaagcgctttcagctattgaagaagtgattaaagagggacttggcgaataatgcttcattctcttaaaggcattgctgcatctgcgggtgtagcaattgccaaagcctttgtgcacgaagagcctgattttacaatcaaacaaaaagaggccaaaaaccccagtgatgagatcaagcgtctggacgaagcactggctatttctcgtgaagaattgacggctattaaggaaaaggcgcttaatgaattaggcgaggacaaggctgaaattttttcagcccatttgcttgtgttaagcgatcctgagttggtcgacgctgtgaaagcaaaagtaaatgaagactccgtaacagcggagtttgcattgaacgaagtcgccaatatgttcattaccatgtttgaaaacatggacaatgaatatatgaaagagcgagcagcggatatacgtgatgtttctcgccgtgtattaggtcaccttatgggaattgaagtcgtttcccttgccgctatcgaagaagacaccattatcattgcccatgatttaacaccatctgatacggcacaattaaatcctgacgttatcaaaggttttgcgacaaacattggcggtcgtacgtctcactctgccatcatgtctagatctttggaaattcctgctgtggtcgggacgaaagaagctactgccaaaattgaaaacggtgcacttgtgattgttgacggcattgatggccacgtcattgtcaaccctaccgaagaagagttagctgcttatgagcaaaagcaagctgattatgaagcgcaaaaagcggagtgggcaaaacttgtcaacaaaaagacgacaacgcaagacacgcaccacgttgagctagcggctaatatcggaacgcctaaagatttagacggcgtgattaacaatggcgctgaagggatcggcctttatcggacagagttcctttatatgggacggacagagcttccaagtgaggaagaacaatacgaagcttacaaagaagtggtggaacggatggatggaaagccagtcgtcatccgtacactcgacattggcggcgacaaagagcttccttatttggatttgccacacgaactaaacccgtttttagggcatcgggccattcgcctttgccttgaaaaacaggacatgttccgggcccagctccgcgccttgcttcgcgcaagtgcacatggcaatttaaagatcatgtttccgatgattgcgacgttggaagaattgcgtcaagctaaacaaattttgcacgaagaaaaagacaagctgcaagcgagcaatgttgatgtcagcgacgagatggaagttggcattatggtggaaattccatcgactgcggtggcggctccacagtttgccaaagaagttgactttttcagcatcggtacgaatgacttgattcaatatacaatggctgctgaccgtatgaatgaacgagtttcttatttataccagccgtaccatccagcagttcttcgtctaattgacatggtcattcaagctgcccacgcagaagggaaatgggtcggcatgtgcggcgaaatggccggtgatgaaattgcgattccccttttgctcggtcttggcttagacgagtttagcatgagcgccacgtcgattctccctgctagaagccagattagcaaattgtctaaagctgaactggaatcttttgcgcaagaagcattgacaaaagatacggccgatggagtcgaacaactagttcgcagcaaatacagccaatcataaggaaataagggcaagcggaaatcgtttgtccttattcccatgtgtttagtcgacaatctaagaaatctagttgataagaggcgttgaggttagtacaatagtcttagaatgaatagaaaccgataggattggatggaggtgcaacgattggaaaaaccttatgacaacaatcgtcaccaattcgaggagattgagcgctctctccgtaaaattgctgacttagtgaaacaaaagggcagagaaattttagcgcatttcccgataacgactccgcaatttgttgcactgcagtggttaaatgaatatggtgatatgaccataggggaactttctaatcatatgcacctggcatgcagcacaactacggacttagtagatcgaatggagaaaaatggattggtgatgcgggtaaaagacaaacaagaccggcgcgtcgtgcgaattcatttgttggatagaggtcaaacgatcatacgtgaagtgatcgctaagcggcaacattatttagcggaaatgcttgagcattttacaagtgaacaagtgaacgatctagaagaaaatttaaatttccttttgaaaacgatgaaggaaaagcgtgaagtgcgttcataaagggagagaaaagacgcgtgaacagaccgattggcattattgattcaggcatagggggattgactgtcgcctcggaaattatgcgtcaattgccaaaagaaccgattgtatatataggggattccgcccgttgcccatatggcccccgccctgtcgaagaagtgcgggcgtttacgtggcaaatgatcggacgtctcttacatgaaggtgtcaaaatgattgtgattgcctgcaatacagcaacggcggttgtgctagaagaggcaagagcccagttagacattccagttgttggcgtgatccgtccaggggcgatcagcgcgatacaagtgagcgaaaatcgccatgttgctgtcattggcacaataggcacaattgcgagcaacgcctacacgatggcactccattcgattgatgaaaacgtaacggttgaaagcttggcatgtccgttatttgtgccccttgttgaacaggggacgattaaaggacctgaagccgaagcggtagtacgcgaatcgctcgctccccttcaaggcgccggtttcgatacgctcattttaggctgtacccattacccattgttaaagcctgtcattgaagcgtgtttgcccggcgttaccgtcatttcatcaggcgaggagacagcaagggaagtaagcagtttgctgttttaccattcaatgaacgaacaacatcaggcaaaggcgacacatcgtttctatacgactggagaagcgaatcaatttaagcaattagcggcgagttggctaaacattcacacagactcagtcgcgtcgattcatcttgatgggccattgccggttcaagcaacgatgaaaagtaagtgaaattcaggcaaacccctttatgtttctgaggcaggggtgtatgctagagacaggcagtagaatgattgagaagaagagacggcttttttgctgttttcttaaaagaggagacttttaaaggagtgtaaaacatggcatttgtcattttgagcccttgcatcggggagaaagctggggaatgtgtcgatgtatgcccagttgactgcattgaagaaggagaagaccaatactttattaatccagatatttgcattgattgcggcgcttgccaaggcgtatgcccagttgatgccattgtggaagaatatgagatggcccctgaagaccaaaagttcttgaaaaaagcggaagaattttttgggattgagtaacagttggaaaggcgctaacaacatttatcaaagtagcccacgatagaaagctcatctccttaacatgggagggagcttttgttttggtcatttcgcttgcttttgttaaaatagcaaggaactggacaaaaaggcgaatttttgtataatataggttggcaaaacatgagacacagatgtggctgactaggtaagacacctacacattgtatcttgcaaatataaggagataggtggaagagtatatgtctaaagattaccgtgtactactgtattattattacactacgattgaagatccagaagggtttgctaaagagcatctcgctttttgcaaaagcttgcagttaaaaggccgagtacttgtagcaaaagaaggcattaatggaaccgtatcagggctgaaggaacataccgatgcctatatggaggcgatgaaagccaacccattgtttgaaggcattgtatttaaagtggacgaagaagagcagcacgtatttaagaagatgcatgtacgccctcgcccagaactggtaacgcttcgcttgaatgaagacgacgtcaatccaaacgaactgacaggcaagcatttatcgccaaaagaatggcgtgaagcaatgctggcagaggacacggttgtcattgacgcccgcaatgattatgagtatgatgtcggccattttcgtggagcgatccgcccagacattaaggcttttagggagctgcctgattggattcgacaaaacaaagagcaatttgaaaataaacgaattcttacttactgcacaggaggaatccgctgcgaaaaattttcaggctggcttaaaaaagaagggtttgaagatgtagctcaattagatggcggcattgtcacttacggaaaagacccagaagtaaaaggggaattgtgggatggcaaatgctatgtatttgatgagcggctaacagtgccgattaaccacgtagcgccaactgtagtcggaaaagattactttgacggaaaaccgtgcgagcggtatgtcaattgcgcgaatccagaatgcaacaagcaaattttatgttcagaggaaaatgagcataaatatttgcgcggctgtacacctgaatgccgcgtccaccctcgcaatctctatgtaaaagagcatcagctttctcctgaagaacaccaagcgcggcttgacgctcttggagaaaagcttcctgctcgattataaatcattgacacgcctcctttttgggaggcgtgaggttgtcgacaaagtcgacaaacaatcagactgatagaaaacgcttgtcagacgaggagtgcagccgagggaagatgcgaatagaacgggggttcatgagcatatgaccgagacaaacgacgaagtatgcgagcgtttgtctatagtctgacgcctcctttttgggaggcgttttttttattcaaggtataaacaagctggtctaatctgagagaaagctcgtatatatggaagtacaaccattctggggagggaaacgtatgcgtaaattagctggagttagcgcgccttttgttgttgtacttgcacttactactacgggctgttcacttggagccaatgatgctgtggacacactcgatgaaccgccagtcacatacacggatgcggaagaggattttggaaacgaagaaaatgaacctgaagaggatgtaacggaagaacaagccgatgaaagcgaagcaggggaagaaacaggggaggaaacaggctcaacagatgaaacaacaccagatgaagctgccgaatcattaaatcagcgagagctctatttaattgatagcaatggcctagtcgtcccgcaaacgttgacgcttccaaaaacagacagtgtgatgaaacaggcgcttgagtatttagtagaagggggaccaatcaacgatattcttcctaacggcttccgggccgtcttgccagcaggaacggaagtcgatatcgaccacttaaaagaagaaaagttggcgattgtcaatttttcaagcgagtttaatgactacaatcttgcagatgaaaagcagatttttgaggctgtcacctggacattgacgcaatttcctgacgttgaagaagtgaaagtcgaagtaaacggttatgagctcgataaaatgccacaaagtgagaaaccgcttgtcggaaacctaagtcgcgcagacggcataaatgtcgacacaagcgaagtagtcgactttaccaacagcacggacattaccctctatttccttggggcaaatgacgaggacacatactatgtaccggtaacgaaaagggttgaaaatgtcgacaatgagctagaggcggcaatcaatgaattgattgacgggccatcgctcatgacaaatttgctaacggaaatgtcaggcgatgtggaacttcttaatgaacctaaactgcaaaatggcgaagtcgtcttagactttaacgaagccattcaatcggccaacgaaggcagcgcgattccgactagtgtattggaaagcttagcgctcacattaacagagcaaggcggcatcgaaaaagtgtcaatccaagtgaacggagaggcaggcgtaaatgaggcgggcattgaagtggaagaagtcactcgccctgagctcgtgaatgctaagccgctatagggaagcagacaaggcgcttgcatatgcaggcgcctgtttaggtatgttatactagagccgatacaatttggagggctttccattgctaaggaggaaaacaaatgcgccaagacggccgaaaacaaaatcaactaagagaggttgagatcattcctcattttacaaagcatgccgaagggtctgtactgatttctgttggcgatacaaaagtgatatgcacagcaagcattgaaaaccgcgtccccccgtttttacgtgggcaaaataaagggtggctagcggcggaatattcgatgctgccacgagcgacaggccagcgaacgattcgcgaagccgcaaaaggcaaattgagcgggcgtacaatggaaatccaacgcctgatcggccgggctctccgggcagttgtcgatttagaaaagctcggtgaaaagacgatttggatcgactgcgacgttatccaagcagatggcggtactcgaaccgcatcgattacaggtgcctatgtggcgcttgtgctcgcagttcaaaaagcgttcgctgaaaaaacaattagcgcttggccgattactgattttctagcagctatatctgtcggcattttgcctgaagaaggggcggtgtgtgatctgtgttacagcgaggattcgcaggcaaaggtcgatatgaatatcgtccaaacaggttcaggcgattttgttgaagtgcagggcagtggagaagaagctgtttatacacgcagtgaattgaatgagctccttgacctcgctgcagagggcattgaccaattgattcacatccaacgcccgtttcttggcgaggcagctagttggattgaagaaaaaaaggggacatgaacattgaacgaattggttgtagcaacaaaaaacaaaggcaaacttgccgactttcaaacattgtttacggatcgttacatagtcaaatcactttatgattaccctgaagtccctgagattattgaagacggcgacacattccatgagaatgccgccaaaaaagcagaaacgctggctgcctatttgcaaaaaccggtcattgccgatgattcaggactgctgatcgatgcccttggcggcaaaccaggagtatactctgctcgctatgctggtgaaccgaagaacgaccaagccaatattgacaaagttctttcggagcttgatggtgttccgacacagaagcgtaccgcccgcttcttttgtgtcattgcattggctgaaccaggaaaagaaacgatttttgccgaaggagcttgcgaaggccgcattaccgaaaagccaacgggctcgaatggttttggctacgatccgatcttttttgtacctagccacggacaaacaatggcagagctatcagccggaacaaaaaaccagctcagccaccgcgcccgtgccctcacagccttaaaagaaacaatcgagggagtgtggccgaaatgaatattcttgtcatcagcgacagccatggctggaccgatcagctaaaggcgattatctcccgccacgaacatgaggtggaccaagtcatccacgtcggcgattcagaactgcctgaacacgcgccagaactggctggggttaatgtggttgcgggcaattgcgatgtgttctcttcttttccaaatgagctagaatgccaatgggaaggaacaaccgcttacatcgcccacggccatcaccatggcgttaaacagacgcttgcgaaactaatcgaccgtgcaaaagaaaaaggcgcacgcatcgccatctacggccatagccatattgcccaggcagaagagcaggatggtgtcatcctcattaatcctggcagtgttcgcctaccaaaacagtaccctgaaggcacatattgctgcctaacaatcggaaacgaacatgtcgacatcaactattggacaaccgctggcaaaaaagcaacagacttggacaagcacttcacgctctaaagggttgcttttgcaaataatggttgacaatcttttcaatgtcctgtatagttataagcgtcgctgctgtaagcggcgctttgcatctacataataaggtcaccgacaataggcatcgagttgcctcatcgaataagcgagcagaggaagaggcatggtatagggtgctcgaaatagagaaaatagcttaatgaaaatgcgggtgtagtttagtggtaaaacctcagccacgagcgacacatccatgaataatccccgagttgcctcgacgcatgaacatcgctgaataagcgagcagaggaagaggcatgatatacggtgctcgaaataaagaaaatagcttaataaaaatgcgggtgtagtttagtggtaaaacctcagccacgagcaacacatccatgaaaaagccccgagttgcctcgacgcattggcttcgtcgattaagccagcagaggaagaggcataaagtacggtgctcgaaataaagaaaatagcttaatttaatatgcgggtgtagtttagtggtaaaacctcagccttccaagctgatgatgagggttcgattcccttcacccgctccaatcatgtcccagtagctcagcaggatagagcaacggccttctaagccgtcggtcgggagttcgaatctctcctgggacgccattctataacatagaaaacctaataaattcaggcctgacaaaagcgaaaaggtgtctaactaaaggaaatactttttcaaaaaatatcgttacataaatgaaacttccaattgtatggtttggaagttttttattttgtgaaagatgaaatttttggtttttcgattaaataggatagcagacattaaacacaggtcccctggcaatcgggtaggtgccaggggcaacctccttcccccctcatcgcctttccttctctgttttcggatcaataacaacgaaaggacgcatcatatcatagtcttcatgctcgagaatgtggcagtgccatacatagtacccggaaaacggcgcaaatcgggcaatgacgcgagtgatttgccctgcaggggcagtgattgtgtctttccagcctcgctcattgattttaggcggaatagtcggccccactaattcgatttggccattttcattgtacagctcaacgttaaacgcccggtggtccaagagttgaaattggactaggtggatatgcatgggatgggggacgttggtgacattgacgaatgaccatatttccgtcgttcctaaacacggtttttcctcaacagggtcactccacagtttgttattgagcaaaaggagaggcctgccgtactcgtccgtcgtcccagaaatttttaagtttcgtatccgtttgacgtcgttttgctgaagcgacgggatataagataggttttgaggaatgatgcttgtgtcttctccggataagggaagaacgacctgaaactgcatcacatccgctgtggcgtcagtgcttgcattgtttttcagtgtgatcgtttggccttcgaatttactgaaatcaatgatgacttcaatccgttcggctggacggatatcgaatgcctgcaaagaaacagtccttcttaacaaaccgccgtctgaagcgatttgataaaagggtgcttctgaatcaagggctagctggtaggaacgtgaattggatccatttaaaatgcgaagtcggtacttccgtggttcaacttgcaagtaaggccaaacttttccgtttactaaaatcgtatcgccgacaaaaaacggcaagaccgacggattcggcaagtttggcgcgggattggctggctgggctgggtagaagagagagccgtcgtcgttaaaagaccggtcttgaatcagcaatggaatgtcaaattctccctttggcaagtttaactgttcttctcgtgggtcacgaataatgtatagaccactcaaccctgcatatacattaaggcgtgtaattcccatcgcatggtcatggtaccagagggtggcagccctttggtcgtttgggtactcataagtttcttgttcaaaaaaagatcccacttctgcaaaatcctttgtaaaccaagcttcagggtagccatcgcttgctggtgtcgtttcgctcccatgcaaatggacgacggtgcggacttctggttcatgggcaacgtggtgtatcgatcggtcaatcggaaggaagtgggtatcagggaggttgttcatccatttgatccgagctggttttccccgcatcacttcaatcgtggggccagggaattggccatcatacccccataagcgagtcgggtttaaatcccgatgcagtttttgtgaaaactccttcatctcaatttcgtaatagtctccatccttgcttgtttttttagggattgctgttttcataataggcatagggtcgacaaatttttctaattccataaaaatccgctcctgtcatgtaggtagtggtatatggaatgttccgtttgacggttttgcttgggcgctttcactaaataggtaaagcgttttttcttaaaaccgcaaaatccgaagaacggattcgggcaattaggccttgtatttcctgcgcaatgtccacaactgataaagcattaacaatgtagcccatccagtgaaatagctcaaaatcgtccagccgacttttaagtaaggtgctgacaaagcaaccactttggagctagtgaaaaaatccctgaaatagaacgctgcaaaaacgattaaagctaacaaaatgagaagaacaaaccaccattcgaacagtttgctccgtgtttgtcctttctcagcgttgtattgattatgccagccgtcttttttgtttttggaaagcttgtctagccaaatatgaataaaaatcgataatttcacccataaatagatttcagcacttatgaccgtgccagaaagcatgacatcgattggccttctcattggcgtttttacggccaaaatcaaattaaggagagaggcgactgctataggaatgacccaaatccaattccaggagaactgagcagtaataagggaagtagcgagcaaaacgaccaacaagatccgaatcgttaaatcgagcaatgacctaaactgcgccctccaaatccgccatcgatgctttgtttttatgtccaattcgctgttcgtaagcaaatcgattgtgccggaatcccatttgtatcgttgctggcggaacgtgtggtatgtcttcatcgagtcaacaaagcagcgagcgtttgggctgatcagcgttttccatttcgctttttgcagctgccaagttagtagcatatcttcgacgtcactatcatcttgccacggtccgtctagattgtttcggttcacaatatcatggagtgcctctggccgaaagagcgtcgcttgcccacctaatacgtaagtgctgcccccgttatattgcaatgttaaaagccaactggccatatcttgtttttgttggtgcgtccaccatctagtaaaggggttcccatactggccgctagcgattttttcttcatagtatggatcgtccaaagaaagttcttttagctttttaggcattctcatcgtgtacttggccattaccccgccaatatttcgggcactcattaagccttcccacaggtgcaaaagcgctccaggtgccattctgctatctgcatccattcctaaaatagcctttaccgatttattgtaaagttgttggtacggacttaagttggatgcgtgaatgtctaataaatcgccatacaagcttttccaagcagtgttcaatgctccgacttttcgctttttgttgtttctcgtttttagcacgatcaattgcaaattgaggtcttgcccgcaatgtaaggccacttctgccgtacgatctgtgcaattatcggcaatgacgatcacatcaaggtcaacccctgccggtaattgctggtctgctaacccttctaaacaatcgcgaatcgactgttcttcattatgtgctggaatgaaggcaaccactcttggtttcataaacgcattttttgtaattggaagcaaatgttctgtgctcaattctctacccccattttccgtgtatgcttgtttgatgtttatgatcgatacgtagtaaaaaataactatgcttaaaaatagattgcttctcctgctgcgataatcaatcttttcgctctattaaaaaggtaattcatttcttgatagaaaacagatggaatttttttagtcgaatagatgggagtagaggcattcgtcatgattaggggaaaagaggaacaggaaaagggcaatggatgaagtgaaaagatgaaaatgacaacgaaaaaaacgccttatgtaagtgaggcgttttttggcgggtgaacaagcgtgtccacttcatataagagtcgatcgatatttccatcaatttggttatcgtcataaaaaatgagcgtccagccttttctttcaaggtacctagcgatttttcgctcttgtgtgagagtggtgtcgcgcatcagcgctatgcgataaggaacgagggcaacatcaatcgacagatggtcaattgcgtattctggggaagcgtaatagcctctctgctgcaacgctctacaaagttggcgttccggctcatttgggcattgctcccaatggttcgtaacaagcacaagggatggcctatgccgatctgttaaaaatttggccaggaatggcagtttgacaagcgtgttctttacccgcttataaaagaaattcatgtaaacaccccctttttttactatccccggttttccgatttttatagcctttttcagtaaaaaaataaaaaaacaaaaaacgcggcctgttcacattggaagcgcattcaacgaaattttcgatctttttatgataaaaaacggttgaccgcaaaacagaagaagcgtatagtaaattgcaataatagtttaataaaaacagatgtctttctcgaaaggaactccttttgggaaacgagagaaaacgggaatttattaaagtagagagactgagtgaactggggagcgattcgatgagaagcaacatgattaaaaaagggatcgatcgagcgcctcaccgaagccttttgcgggctgccggcgtaaaagaagaggatatggataagccgtttatcggcgtctgcaactcctatattgacatcatcccagggcatatgcatttgaataaatttgcagaagtggcgaaagaagccattattgaagccggaggcattcctttcgaatttaatacaatcggcgtagatgatggaattgcgatggggcacatcggcatgcgttattcgctgccaagcagggaaattatttgtgatgctgccgaaacagtcatcaatgcccactggtttgacggcgtcttctatataccgaattgcgacaaaattacgccaggaatgctgatggcggctgtacgcacaaacgtgcctgcggtctttgtctctggtggtccgatggaagcaggccgtactaaagagggaaaaagcctttcacttgtatccgtatttgaaggagtaggcgcattttcgtcaggaaaaatgacaagggaagagctgcttgaaattgaacagttagcttgcccaacttgcggatcttgttctggaatgtttacagccaattcaatgaattcgcttatggaaatgctcggtctggctcttccaggaaacggaacgcttgtcgctacatctacggaacgtcataacttgattaaagatgcagcgaagcatttaatcaatttgattgaaaaagatattcgcccacgcgacatcgttaccgaagaaacaattgacgatgcctttgcccttgatatggcaatggggggatctaccaatacagtgctccatacattggccattgccaatgaagccgaaatcgactacgatttgacacgtatcaacgaagtggctgagcgagtgccttacctttgcaaaattagccctgcctctgattactcgatggacgacgtccataaggcgggcggtgtagctgcgatcatgaaagagctgattgaaatgggagcggtcaaaggcgaccggatcaccattacaggaaaatcactctatgaaaatgtcgctcatgctcaaataacaaataccgatgtcattcgcacgaaagagactgcgtatagtccagtcggcggtctatcaatcctttatggaaatttggccccggacggcgctgtcatcaaagtaggtgcagtggacccttcgattaaaacatttactggggaagcgatcgtgtttaattcccaagaagaagcgcaagagcaaattaataacggcgctgtgaaagaagggcaagttgttgttatccgttatgaaggccctaaaggcggtcctggaatgccagaaatgctggcaccgacttcagccattcaaggcagagggcttggcaccaaagttgcactcattacggacggccgtttttccggcgcttcacgaggaatttcaatcgggcatatatcgccggaagcagcagaaggcgggccaatcgccttcgtggaaaatggcgacatgatcaaaatcgatttaatcgaacgcacaattgagtgggaaataagcgaagaagagttagcaaaacgccgtgaaggatggacagagccggaaccaaaagtcaaaaaaggctatttggcccgttactcaaaacttgttacttcagccaatacaggcggcgttatgaaaatctaataacgataacacaatgaagaggaaagtaatttttgctttatctacagagagccgttggttgctggaaaacggtgttaaagcttaaatgaaactcacctctgagtgcgtctctgaacattgtagtaagagcgccggatgctgtgaacgcattcgttataaaaactgcaagccggatttcggcttgctagaggctaaccattgttagcgaaaaagggtggtaccgcgtgaagactttctcgccccttgctggatcccagcatgggcgcgcagaaagtcttttttgttggcggaaaataaataaatagaaaatcaaaactaagggaggcgcgagagacatgatccattccaatgaagcggcaacgccacaagccgctgaaaacaagcaggctgtttgcacaggttctgagattttattaaaagcacttgccagcgaaggagtcgaagtcatttttggctatccaggcggagcgattttaccaacatacgatgagatttataaattaggaatgaaccatattctagcccgccatgaacaaggcgcaatccacgcggctgaagggtatgcgcgcattacccaaaagccaggcgtctgcatcgtcacttcgggaccaggagcaacaaatgtcgttacaggcattgcggatgcgatgatggattcgctgccaatggtcgtcatcaccggccaagtggctacaaaagtgattggtaccgatgctttccaggaagccgatatgcttggcattacaatgccgatcacgaagcataattttcaaatccgttccatagaagaactagcgcaaacagtcaaagaagcgtttcatattgcggtaagcgggcggccgggacccgtattgattgatttgccgaaagatatttcggaaaaactgggaatctttgattatgaggaacctgtccatttgcctggctaccaaccaaccgttaaaccgaataagcagcaaattcgcaagcttctggataagtttaaagaagcgaagcggccagtcctgcttgtcggcgctggtgtcctccatgcacaagcaagtgaggaattaactgcatttgctcgtaaatttcaaatccctgtcgctcaaacattgcttggactaggcgcttttcctggcgaagaggaattgcatctcgggatggccggcatgcatggaacatatgctgcaaacatggcgctccacaaatcagactttttgatcaacattggctctcgttttgatgacagattaactggtgcccttgaacattttgctccggaggcatgtattgcccatatcgacattgatcctgctgaaattggcaaaaacgttcatgtcgaaattccggtagtaggggatgcaaaagaggctttagcgatgctagtgaaaggaagcggggctatagatgagcacgacgagtggcgcaaacaagttagcgattggaaacgagattatccgctgtggtttcatcgcgacggggaagttattaagccacaggagctgatccaaaaactgtatgaacatacaaagggtgaggcgattgttacgacggacgtcggccagcatcaaatgtggacggcgcaacattttaagtttaacaaaccaaatcgctggattacatcaggtggtcttggcactatgggattcgggtttccagcggcaattggggcgcaaattgctgaaccggaattgccggtattggcgattactggtgacgcaggctttcagatgacgcttcaagaaatgtcgattttgcaagaactggatttgccagtcaaaattgtgattgtcaacaatgcttcccttggaatggtacggcaatggcaacaacgttttcatggcgagcgctattcccattcgcttttcccaatccagcctaactttgctaagctcgctgaagcttataacattaaagcggtaaaggtcgacaaactgtcgatgctggacgaagcgattgctgaaacattggcgcatccaggtccggtattgttggaagtgtgtgtcgccaaagaagaaaacgtctacccgatggtttgcccaggcacaggtcaccactgtatggaaggagtagagccatcatgaaacggacgattaccgtactcgttaacaacaaatcaggcgtgctaaaccgcatgacaggcttgtttgcaagaaggcagtacaacattgacagcatcactgtcggtgtaaccgaaaatccaacgatttcgcgaatgacatttgtggtttttgtcgactcgatggaaaacgtcgagcaaatgataaagcaacttcataaacaagtcgatgtgttaaagattaaagacattaccgatgaagcgattgtcgagcgtgaacttgcccttgtccgcgtaggagccacgccccaacaacggggcgaaatcgcctcccttgctgaaacattcagggcgcaagcagtcgatatcggcaaagagtcgatgacattgcaaattactgggaataacgaaaaaattgaagcatttattgaattagtcaaaccatatgggatccaagaactggcccgcactggcgtgactgctgttaatcgcagctctaaagctagcaccgatacgtcaagactaacgctgattaattagcgagtccatataaaaacaataattgaaggggagattgaatcatggcaaaagtatattataacggagatgtaaatgaacaagtattagaaggaaaaacggttgccatcgttggttatggctcccaaggccatgcacacgcacaaaatttgcgcgaatcaggagtggacgtcattattggattgcgtccaggaaagtcatgggataaagcaacggaagatgggttttctgtctactctgtccgcgaggcttctgcaaaagcagacattattatgattctttcaccagacgaacatcagccggcaatctacaaagaatcgattgaacctgaattgacggctggcaaagcgcttgtattcgcacacggctttaatattcactttaaccaaatcgtaccgcctgaacatgttgacgtctttctagctgccccaaaagggcctggccaccttgtccgccgtacgtatacagaaggcgctggcgttccagcactaattgctgtctaccaagatgcgacagggcaagcgaaggacattgcacttgcttatgcaaaacaaattggcgctgcccgtgcaggagtgcttgaaacgacgtttaaagaagaaacagaaacagacttgtttggtgagcaagcggtactatgtggcggaacttccgcattggtcaaagcagggtttgagacgcttgttgaagcaggttatcagccggaaattgcttactttgaatgtttgcatgaattaaagctgatcgttgaccttatgtacgaaggcggccttgagtacatgcgttattcgatttctgatacagcgcagtggggcgatttccaagctggaccacgcatcgtgacagacgaaacaaaagcagcaatgaaagagattttaagcgacatccaaaaaggcaagtttgcgaaaggctggattttggaaaacaaactgaaccgtcctgagtataacgccattaacgaagcggagaaaaatcaccctcttgaagtagttggccgcgaattacgggaaatgatgccatttgtgaaagcatccaaatccaagggagtggtcgcgaatgcgaaaaattaacgtgtttgatacgtcgctgcgcgatggagaacaaatgcctggcatcgctttgactgtaaaagagaagttagaaattgcccggcaattggaacgtctaggtgtggacattattgaggctggttttccagcctcctcacctggcgattttcaagcagtcaaggaaattgctgaaacagtaaaaggttcatccattaccggtcttgctcgggccaagaaaagcgatattgactctgcttgggaggcgttaaaatcaagcgctgaaccaagagtccacgtttttctggcgacatcgccgattcatatggaacataaacttaaactgactccagatcaagtagtggagcgtgcggtagaaagcgttcgttacgcagcggaaaaatttccccacgtccagttttcggcagaggatgcaaaccgttcagaatggccgttcttaaaacgaattattgaagcggcgattgatgcaggcgcttctgtcattaatcttcctgatacagttgggtatagaaccccagaagaaatatcgaaattgtttgaatttgtaaccgaaaatgtcaaaaacatcgaccgtgccattttatccactcataaccatgacgatcttggcatgggtgtagccaattcacttgccgctatttctgcgggggcgggccaagtagagtgtacaatcaatggcattggcgaacgtgctggaaacgcggcgctagaagaaatcgctgttgctttgcaaattcggtctgattattaccaggcgaaaacagggctaaaactatcagaactaaagcgcacaagcgcccttgtgagcaggctaacgtcgatgaatgttcctggaaataaagcggttgtaggagcgaacgcgtttgctcatgagtcaggcatccaccaagacggaatgctcaaaaacaaagaaacctatgaaatcattacgcctgaactggtcggcgctacgtctacattgcctttaggaaaacattctggccgtcatgcatttaaaacaaagttgaatgaattaggtttttctggctctgacgaaaagctacaaacgattttcagcgcgtttaaacaactttgcgataagaaaaaagaagtgaccgaagatgatttgtatgcattgattgccgatgcaaccgatgatcaagatagcacagcttatgaactaactgcgctgcaagtcacgtatggaatgaaccacgtaccaactgccacgattcgccttaagaaacaagatgacagcgaaatcgaagaagcagggactggttctggaagcgtcgaagcaatctacaatacattggcaaaaatgactggtggcaattacagcttagctgattaccgaatccagtcggtaaatggtggagaagatgcgttagcggaagttcatgtgcgcattaaagcagacgatttcgaacaaagcggacggggcgtggcacatgatgtgttagaggcatcagccaaagcgtatttgcacgctgtgaaccgcgtaatagcccggaagcattatgcaaaacgggaaatggcgaaggtggaaagctaaggaggagacaatggaaaaacaaatattgcttttacctggggacggcattggcccggaaattattgccgaaaccaaacgggtgttagaagaaattgcccggctgtatcaccatacatttcagtttgttgaagggcgaattggcggtgatgccattgacgcaactggcagcccccttcctgaggagacgctggatcttgccaaaggtagcgacgcaattttgcttggcgcagtcggcggaccaaagtgggacggcaatgcccctgaaaaacggccagaaaaaggtttgctgcaaatccgcaaggcactgggcctttacgccaaccttcgccctgtccgtgtactgaaaccgttaatgggtgcatccaccttaaaagaggaagtgttggccgacgttgatttgttgattgtacgggagttaacaggcggactttattttggcgagccgcgtgaacggcgacaaatcaatggagaagacggggcagtggatacactcctttatacaaggggtgaaatcgagcggattgtgcaccaagcgtttcaatttgcaagaacgcggaagaaacgggtagtctctgttgacaaggccaatgtcttggaatcgagcaggttatggcgggaaattgctgatgaagtagcccgcgagtatccagacgtcacgctttcgcacatgcttgtcgataatgcggcgatgcagcttattcgtgatccaaggcagtttgacgtcatcgtaacggaaaatttgtttggcgatattttgagtgatgaagcttcgatgattaccggatccttgggcttattgccctcggcgagcatgaatacgtcaaaagtcggcttgtttgagcctgtgcacggctctgctcctgacatagcagggacgggcgcggccaatccgctagcgacgattttgtcagcagcgatgatgctgcaatatagttttgggttagcggacgaggcaaaagcaatcgaagtcgcagtcgaccgtgtgctcgctcaaggagtacggacaaaagacatcgcaaaagcaagcgaaaacgctgtttcgacaacggcaataacaaatgcggttatggaggcgcttgctcttaaaagtgcctcaagccgctaaaaaaagagggagcgttatggcgaaaacaattatcgagaaaatatgggaatcgcatacggttgtggatgaatcaggaaaacctaatttgctttatgttgatttgcatatggtgcatgaagtcacatccccacaagcatttgaagggttgcgacttgcaggaagaacagtgaggcggccagataaaacgtttgccacgatggaccacaatgtcccgacagtgaatcgttatgacattcgtgatcaaatcgcgcgcacgcaaatggagacacttgctgctaactgcaagcagtttggaatcgagatggttgatttagaccacccggaaaacggaattgtccatgtcataggacctgaactgggcttgactcagccagggcatgtaatcgtctgtggcgacagccatacatcgacccatggtgcatttggcgctattgcatttgggattggcacaagcgaggttgagcatgtgttggccacacaaacgatttggcaatcaaagccgaaaacgctcgaggtccatatttctgggcgcctgaacgaaggcatatctgctaaagatgtgattttggccatcattgccaagtttggcgtcgatattggcacaggcagcatcattgaatttactggagaagctattcgcggtatgacaatggaagaacggatgacgatttgcaatatgtcgattgaggcaggggcgaaagcaggtttgatttcccctgaccaagtaacgttcgattatttgcaaggtagagcaaacgttccgaaaggcgaggcgtacgacgagattgtcgagaagtgggcccaattggcaaccgatccaggagccacctatgatcgatcagtgacgattgatgcagcggaaattgaaccaatggtgacatggggaaccaaccctggccaaggggcagggatttcaaaagctgtaccacggcttgacgatgcgaaatcggaagtagaacggcgcgccattagccaagcgcttgattatatggacatcaaaccaggcacgcctttgagcgagattgaaatccagcatgtgtttattgggtcatgtaccaattcacgcttgagcgatttaagggcagcggcagccgttattaacgggcggaaagtagcgcctggcgtccgtgcccttattgtccctggctcccaacgtgtcaaaaaacgtgctgaggaagaagggttggatcaagtatttaaagaagcgggatttgaatggcgtgattcaggttgcagcatgtgtttgagcatgaacccagacgttgttcctgaaggggaacgttgtgcctcgacttccaaccgaaactttgaaggtaggcaaggaaagggagcgcgcacccatttggttagcccggcaatggcagcagcagccgcgatcgctggtcggtttgtagacgtccgcaaaatggtaaaagcaggtgagtgttaatggaaccgattcaagttcataaaggcaaagcagttgttttagaccgcgttaatattgatacagaccaaattatcccgaaacaatttttaaagcgggtagagcgcacgggcttcggccaatatttgttttacgattggcgttttcaagcagatggtgcagataacccggcatttgagctgaatcagccagaagcaaaaggggcaagcattttaattaccggtcataattttggctgcggctcttcccgggaacatgcgccatgggctttgtatgattatggtttccgcgtcattatagccccaagttttgccgatatcttctataataattgcgtaaaaaatggtttgttgccgatccgcctttcgcctgaagaaacggaattgtggatggaacgggcgaaagaaagccaagaagagattacggtcgatttaggcgaacagctcattaagcaaaatgggctagaaacgaagtttgaaatggattcgtattggaagcaaatgctctacaacggctgggatgaaattagccttacccttcaatatgaagaagcaattgctaaatacgagcaccgccagtcagcagtcaataaataaaagcaaccaaaacgcttgctagacgaggcgtggagagagaagcgcgagggttggagctatgttcgatatacagagtcccattccctagggctttcctaagtaggaatgtagtgtttggctagagtctgtgaaagtccccttttgggggctttctttgattaagtttgatttaaaagggaatagggaaggaatagcgaataggagtacatggggatttgtataagatagaggagccgtgatacattaaaggaatcgggcagaaagcgggcgattgcattgacgaatgaacatcaccatgaaccacaaaacattatcctttttccaggagtcgtgaaacggcttgtagaggaaggcatggatgaattaaaacaaaaaaatggccaaaaagcgctccagcttttctcacaagcggaaacgtatgagccgacgagcgcccaagcacgttttggcgtagtactaagtttgattgagctaaaccgtcaagaggaagcggtagaaaaaacaaaagcgctattaaacgaaggcattggcgattactacgaaacattgcaagtccatgtgtctttgcttgtacagttatcgcgttatgaggaagtcgtccacttgttggaaacggttctcagcgaaaaccggctgccatctgaacatgcggaaactttttatgaacttctccatttcagtaggcaaatgtcgagctcacaagcatatgacgcctctctcttggatgaagaacataaaaaagaaacagagctggagttgcgtgctggcctgcatgcaacgaatgagccagcaaaatggaaagcattgcaaacggtgaagcagctcaatgtgaaggcgttactgaaagacgtgcgcgagttagctgccgatgaaaacgccaaggcacttatgcgcacgtatgcccttgtgctcttgcatgattggaatgatcggctaccgatcgtcattaagaaggaagagcggagcatggaagtgcaaccagccgaattgccgataccaggagaacgggacatagacaaagcgattcgtcaagctttggaagaacaacttgaacaggaagacccggtgctcttgcaaatggcaagacaactacaccatacatacttattgatcacgtatcctttcttaccagatccgccgaatccaaaagcatgggcatgtgctttccatttagttgctgctgaacagcttggcttagaaacagatgaagaggacatggttgattgttatggctgcaaacggtttgacgtgctatgtgcttcaaatgaaatcgaagcgttggaaaaggatattctccttgagtcacaagatcaaaaccaatggttccatacataagagattttagtaagcaactgattgaaagatggcgcctttatgttataatggaatggttgtcaaaaacgtgagaaatgattttgctattttagtgctggagggaataagaacatgtctgcaaaatgggaaaaaacagaagagaacacaggcgtcttaacaattgaagtcgaagcagataaagtcaatgatgctttagataaagcgtttaaaaaagtggtaaagaaagtgaatgtccctggttttcgtaaaggaaaagtgcctcgtggcctatttgaaaaacagtttggcgttgaatcgctttaccaagacgcgattgacattttgttgccagaagcttatgcaaatgctgtcgaagaaacaggcatctatcctgtagatcgtcctgaaatcgatgtagaaagcattggcaaaaatgaaccgcttatcgttaaagctaccgttacagtaaagcctgaagtcaagcttggtgattacaaaggccttgaagtagaagtgccgagcgcagatgtaaccgatgaggatgtagaagcggagcttaaaaagctacaagaacaacatgcagagctcgttgttcttgaagagggtgaaatcgcaaatggcgatacagctgttattgatttcgctggctatgtagatggagaagcatttgaaggcggcacggctgaaaattattcattggaaatcggttcaaattcctttatccctggatttgaagaacagcttgtcggcttgaaatcaggggaagaaaaagatgtcgaagtcacattcccagaagaataccacgcagaagaacttgccggaaagcctgcgacattcaaagtgaaagtgcatgacattaagcgcaaagagttgcctgaactcgatgacgagtttgcaaaagatgtgaatgagaaagtagaaacattggacgaactgaagaacgaattgcgttctacattggaagagcaaaagaaaacagcttctgaaaatgccgtccgtgattcactgcttgaaaaagcggcagaacaagcagacatcaatgtgcctgaagcgatgatcgaaacggaaacagaccgtatgttgcaagaatttggtcagcgtctacaagcgcaaggaatgaacttggatatgtacttccagttctctgggcaaacggaagaagacatgcgcaaccaatttaaagaggatgctgaaaagcgcgttcgtgtaaacttgacactcgaagcaattgcagaagcggaaaatgtcgaagtaagcgaagaagagattgaagaagaattccaaaaaatggctgatatgtaccagcgttcagtggaagaaatcaaagcattgctcgctgcccaaggcggcacagacaatgtaaaaggcgatctgaaactgcgcaaagcgattgacgtgcttgtcgaaaacagcaaagaagtaacaacagaatcataagggcggcacgagccttacactgcctttgtatgtgaacttggcatggaattgttccatgcctttctccatatttttagtatgttctgttccgatattgaacatgctggaactaggcaaattttaaagggtttttgcatcgtttgcttgaatagtattataatgtggcaaagcgagcatccattcctttttgaagtccacaattaaggcaaatcgcaaaatacgtacataaaaagcatttttctagagtgttaacggcgaatatgctacaatgatttgacgttaatgattttctttgtttgagctcctcaagcaacagaaaataatatcctgtaaggggtgagggcatgtttaaatttaacgaagaaaaaggccaattaaaatgttcgttttgtggaaaaactcaggatcaagttcgaaagctcgtagctggccctggtgtgtatatatgtgatgagtgcattgaactatgcacagagattgtagaagaggaattaggcacggatgaagaagtagaaattgaagaaatcccaaagcctaatgaaatttgctctattttggatgactatgtcattgggcaaagagaagcaaaaaagtccctttctgtagcagtctataaccattacaaacgaattaattccatgtctaggtctgaagatgtagagctttcaaaaagcaacatcaccttaatcgggccaacaggaagcgggaaaacgttgctcgcacaaacgctagcgcggattttgaatgttccgttcgcgattgcggacgccacctcgcttaccgaagccggctatgtcggggaagacgtagaaaacattttgctgaagctgatccaagcggccgattatgatgtggaaaaggctgaaaaaggcattatttacatcgacgaaattgacaaagttgcacgcaagtcagaaaacccatcgatcacacgcgatgtttctggtgaaggggtacaacaagcattgcttaaaattctagagggaacaacggcaagcgtccctcctcaaggcggccgcaagcatccccatcaagaatttatccaaattgatacaaccaatgtcctctttatttgtggaggggcgtttgatgggatcgaacaaatcattaaacggcgccttggaaagaaagtaattggttttggtaccgacgatgccaagcaagatgatctgaagccaggtgaatatttatcaaaagtgcttccagaagatttgctgcgctttggcttaatcccagagtttattggtcgtttgccaatcatttcaagtttgtcgccgcttgacacagatgcgctcgttgaaattttgacaaagccaaaaaatgcgcttgttaagcagtatcaaaaacttctagagcttgatgatgtagagcttgaatttaccgaagatgcgttgcgagaaattgccaataaagcaattgaacgtaagacaggcgctcgcgggcttcgctccattattgaaggcatcatgctcgacgttatgtttgatttgccgtcacgagaagatgcagtcaaatgcatcatccatggtgcatgtgtaacagatgacgcaccgccgattttaaaatcagcagacggcacagaattaacgttggataaaccgaaagaaagcgcatagctagcccccctccggcaaactgccggagggtttttacgcttccttcctctaaaggtgcaattgaaattggaaaaaatgagcgtgttgtttttcggttaacgaaaacgctctaggaaatactaacagcatcattcatctattagggaggaaggaaattatgggctttgcaaccattgccttgtttgtgcaactgttttttggaattatcattggtgtttacttttggaatttgttaaaaagccagcgtagccaaaaaacatatcttgataaagaatcaaaagtggaattagagaaaatgaaacggcttcgtgacattcgtttgacagaacccctcgctgaaaaagtgagaccgaagcatttgtcggaagttgttggtcaggaagatgggttaaaaacacttcgcatggcgctgtgcgggccgaaccctcagcatgtgatcatatatggtcctccaggagtcgggaaaacagcagcagcacgcttagttcttgatgaggcgaaacgccaagcagactcgccgtttcgctcaactgctgcttttgttgaattggatggcgccacgtcccgtttcgatgaaaggggcattgctgatcctcttattgggtctgtacacgacccgatttaccaaggggcgggctcaatggggcaagcgggcattccccaaccaaagccaggggctgttacaaaagcacatggcggtattttgtttattgatgaaatcggcgaacttcatacaatccagcagaataagctgttaaaggtgcttgaggatcgaaaagtgtttttagagagtgcttattacagctcggaaaacgagcaaatcccttctcacatacacgatattttcaaaagggggctccctgctgattttcgcctagtcgctgcgacgacacgccagccagaagaaatgccaccagccattcgttctcgctgtctagaagtgtttttccgggctcttgatcctgatgagattgtggaaattgcaaaaagagctgctgataaagcgggcatggcgttaacaagtgaagcggccaaaaaggttgctgactatgctaccaatggccgggaaacggtcaatgtcgtccaaattgcggtaggagccgcccgagccgataaacgcacttccattgaaaagcatgatattgaatgggttctccattcgagccaaatgtcgccacggcccgaacggcgcatccacgaacagcctgccgttggcctcgtcaatggcttggcagtaacagggccaaatagcggcgcccttctggaaattgaagtgcttgtacaagagcgggcagggaatggtacgctgacgatcacaggaattgcggaagaagaacagtccggttcgcaaatgcgttcaattaaacgaaaaagcatggcccggtcatccgttgaaaatgtcattaccgttctgaagcggaaagggctgccgactggtgactacgatattcatgtcaatttcccagggggtacgcctgttgatggcccgtctgccgggattgccattgccactggtatttactcgggtattaaacaaaaggccgtttcaaacgaagttgcgatgacaggggaattaagtgttcatgggaaagtgcgaccgattggcggcgttattgcaaaagtgaaagcggcaaagcaagccggagccaaacggattattattccgaaagaaaatgaacaagcgctcttgaaaacaatagaagggattaccattcatcccgtgaaaacgtttgatgaagtccttgagcttgcactcgtagaggaaaaaattgaaacagaggcgatcccagcgtctgcggtgggatacgatccctctccaatctaagtattagacaaagggcgcgtaagtaagctaaaataagttgaatgagtagaaatgatgtaaatgacagagcgtcaatcatttgagtggcgctctaagcgttgtgtgcttgaaagcaagaaaacagtattatcttttcttgcattcggatacactggtaaaacaaaaaggattaaggcttctagagaagactgtgcggaggtgtatgacggatgggtgaaattcgttcggaacgacgtgttccgctccttcctttgcgtggtgtgcttatttttccaggcacgatcatgcacttagacgttggacgcgaaaaatctgtcaaagcgttagaggaagcgaaaagcaatggccatcacttatttttggccacccaaaaagaaacgacgttagatgatcctcaacaagaggatttgtataaaataggaacgtttgcgaaaatcaaccaagcgtcaaaattgtcaaacggcactgtcagaatacaagtggaagggatccaacgaggggaaatcacttcttttaaagattatggcgatgtcttagttgtcgatgtttccttatttgaagtaaaacgggaaggcgatattgaatcagaagcattgatgcgcacgcttttatcgatgtatgaacaatttgccaaacaatcgaaacgagcttcacaagaaacggttaattcccttagagaaacgacagaccctgaattgttttcggacaccgttgctgcgaacttaacgttgaaactaacgcaaaagcaagaattgcttgagttgattgatgtcaacaaaaggctccataaactgattgaacgattaggcaatgaacaagaagtgctggggcttgaacggaaaattggccagcgcgtcaaaaaggcaatggagaaaacgcaaaaagaatattacttgcgtgagcaaatgaaggcaattcagaaggaattaggcgaccgtgaagggcgaacgggcgagattgcggagctccgtgaaaaaattgatgcagctggcatgcctgaacatgtgtatgaaaaagcgatcaaagaactaggtcgctatgaaaaaatgccagccaatgcgggggaaagctcgattttaagaacgtatttggattggctcatccaacttccatggaaaaacgaaacagaagatgagcttgacgtcggtcgcgctgaagcgattttgaatgaagaccattacggacttgataaagtgaaagagcgcgttcttgagtatttggccgtgcgccaactgacaaaaagcatgaaaggcccgattctgtgcttagctggaccacctggagtcggcaaaacgtcactggcccgttccattgcccgctcattaaaccgggagtttgtacgtatgtcactaggtggcgtacgtgacgaagcagaaatccgcggccaccgccgcacatacgtcggcgcaatgccaggccgtctcatccaaggaatgaaacgagcagggacgatcaatccagtatttctcctcgatgaaatcgataagatggcccaagattttaggggcgatccagcatctgctttgcttgaagtgttagaccctgaacaaaacagtacatttagcgaccattaccttgaagaagcttatgacctttcgaaggtaatgtttgtgacaacggcaaataatattgccacaatccctggacctctgcttgaccgaatggagatcatctcaatcccaggctataccgagctggaaaagttagagattgcccaaagctacttgctgccgaaacaagtgagcgagcacgggttaaaaaagagcacattacaagcaaaacctgaagctcttaaaaaagtaatccgctactatactcgagaagcaggtgtccgtggtcttgaacggcagctagcaacactatgccgcaaagccgcgaaaatgattgtgatgaatgaaagaaagcgtgtcgtccttaccgaaaaaatggtggaaacgatgctaggaaaaccgcgttttcgctatgggatggcggaagtggaagaccaagttggcgcggcgactggccttgcttatacatccgctggagggacaacgctggcaattgaggtttcagcagttcctggaaaaggcaagctgacgctaacgggcaagcttggcgatgtcatgaaggaatcggcccaagcagctttcagctatatccgttcccggtcaaaagagcttgagattgatcctgggtttaatgaaaagacagacatacacatccacgtacctgaaggggcgactccgaaagatggcccgtcagcggggattacaatggcgacagcacttatatctgcactgactggaaggaaagttgaccgcgaagtcggcatgactggcgaaattacattacgtggccgggtgttgccgattggcggcttaaaagaaaaagcaatgagtgctcatcgggctggcattaggacgatcattattccgaaagacaatgaacgggatgtcgatgatattccagaaagcgtcagaaaggaattaaagattgtttctgtctcccatttggatgaagtattgaaagttgcgttgaaagaggaaacccaatgaaagtaacaaaggcagaattagcgcatgtcgctgtaaaagcagagcaatacccaaagaaccagcttcctgaacttgcccttgccggccgttctaacgtcggcaagtcttctttcatcaacaaaatgctaaatcggaaagggcttgcccgtacgtcaggccaaccaggcaaaacacaaacgctcaatttctatgaaattaacgaacgcctttactttgtggatgttccaggctatggatatgccaaagtctcaaaaacggaacgagctgcttggggcaaaatgattgaaacgtatttgtccgagcgagaagagctaaaagccgtgttgcaactcgttgatattcggcatcgcccatccgaagacgaccaacttatgtacaactggatgaagcattacggcatccctgtcattttggtcgcgacaaaggctgataaaatcccgaaaggaaaatggcagaagcagttaacggccattgccaaaacgttggacaaagaggcaagtgacccgttgctattcttttcttctgcaacagggctcggcaaagatgaggcttggcgaacgattttgaaccatttaaaagtaaccgaatgagcggtggagtaaacttccactgctttttttgcaagtgatcaagcctagattacattcattcaaaataagagcgttttctttgtttgttcacaaaatgtttttgagtccttatttagacatgttataattaagacatgttataatcgattttgggcaaagtaaagtagagaaactagaattggatcgacctttagggggctatgacatgcatacgatcgcaataggattaaattataaaacagccccagtagaaatacgggaaaaactagtatttagcgaacaccagcttccagaagcacttaagaagcttcgctcatctaaaagcatgatggaatgcgttatcctttctacttgcaaccggactgaactgtatgtagtcgcagatcagcttcatactgggcgctattttgcaaaagcctttttggcagagtggttttctgtcgatatggaagatgtaacgccgtatttggttatccgtgaaaatgaccatgctattgaacaccttttccgcgttgcttgtgggctagactcaatggtaatcggcgaaacgcaaattcttggacaagtgaagcaggcctttttgctcgcgcaagaagagaaagttacaggcacggtgtttaaccagctatttaaacaagcggttacgctcggcaaacgtgtgcactcgtcaaccgaaatttcttcacaagcggtttctgttagctatgcaggcgtagaactgggaaagaaaattttcggtacgttttcagggaaacatgtgctgattttaggcgctggaaaaatgagcgaactgacggccaaacatctttatgcgaatggggcagcttcgattagcgtcatgaaccggacaaaagaaaaagcggtggaactggcaagccagtttgccggaacggctcgctcttttgctgaattgaatgatgctttgaaagaagcggatgtcgtgattagctccacaggagcccgcgactttgttgtcacaaaggaaaatgctgcagacgcccttaaaaaacggaagggcaggccgctgtttgcgattgatatcgcggtgccacgggatatcgacccggaaattgcaacgattagcgacgtttacttatacgacattgatgacttacaaaacattgttgaaacgaataaaaaagagcgcaaaaaagaggctgaaaaaatcggtgttatgatcgaggcagagatcgatgactttaaagcatggctaaacacactaggggttgtacctcttattacagccttgcgtgagaaagcattgcaaatccaaggcgatacaatggaaagcattgagcgaaagcttcctcacttatcagaacgtgacataaaagtgttgaacaaacatacgaaaagcattgtcaatcaattgctccgcgacccgttgacgagagtgaaagagcttgcagctgagccagatgccaagcattcccttgaattgtttaagacgattttcgcccttgaagcacaaatagaactggctgaaaaggcagaagccgatcatgcggaacaatcttggaaagaagggcagcgcccttccttaaatcaaggcatggcgttgcggacatagggcgtggtgagggccaatggatttcgtttatccaatcaccgtcttgctctatagtttgagcttaattggatattttatcgactttttgactaacaaccaaaaagccaaccgaattgccttttggttgcttttgtttgtgtgggggctacaaactgtttacttcgttatgcggatgtttgaattggaccggctcccattaatcactccgtttgaagggctgtttttttatgcatggtcgattgtgaccgtttcgcttttcattaattggaaagtgaaaatggcctttttagtgttcgtcctaaatgtcctcggttttgccgtaatgtcaggcagcttgttcgtcccttctggtgatgtgacacaagcaacgatggatttgcttgcctcggaactgcttgtcatgcatgttgtgtttattttgctttcctacacaggttttactgtcgcagccgctgctgcagtgctctatttgctggcgcaccagcttttgaagcggcggctatgggggaagcggctcattcgccttgattcgctgccacaaacggagaagttttcgtacttcgcatctgtggccagttttccgttctatttggtcggcgtcatctggggcgtcgtttggtcgattagccaatatgaccatgtttggtggacggatgccaaaacgatttggtcattgtccgttcttgctgcttatgggctttatttttatttgcggctggtgattgtcggaaaaggctatcggtcgatttggcttaatataggcgcctttgccgttttgctcattaattatattgtcagcggccgttatacagattttcacacatggttataaggaggagcacatgcgaaagattgtgattggcacacgccgaagcaaattggcgttaacgcaaacgaattgggtcattgaccagcttaaacagcttggcgttccctatgagtttgaagtgaaagaaattgtgacgaagggcgaccgcattctcgatgtgacgttatcaaaagtaggcgggaaagggttgtttgttaaagaaattgaagcagcgctccgctctggggaaattgacgttgcagtccactcaatgaaagacgtgccttccgaactgttggaagaattcactcttgctgcaattacagagcgagaagatccacgggatgtgcttgtgagcgaaaatggccacacactggacgagctcccagctggtgcaattgtcggaacgagcagcttacggcgttctgcgcaaattttacataggcgcccagacgtgcaagtgaaatggatacggggcaatgtggagacccgtttgcgcaaactaaaagaggaagatttttcggcgattgtcttggctgcagctgggttaaagcggcttggctatggcgaggacgtcatcaccgaatacttagacaaagacgtatgcttgcctgcgattggccaaggggcgctagggcttgaatgccgtgtggatgacgtagaaacaacggaactgttagcaaagctgcaccatgaagaaacaggaaaagccgttttggcagaacgagcctttttaaaggaaatgaacggcggttgccaagtgccgattggcgggtatgcaacggtgcttgaggatggcgcagtattcctgacagggcttgtcggttctcctgacggcaaaacgatactaaaagaaggaaaaagcggaatggttgcggatgagctagggaaagaggtgtctagcctgttgactgcacaaggggctggagcgattcttgaaaaggtcaggagcgaactggaagggtcatgaaaccgctaaaggggaaacatattctcattacgagagatgagcggcaaaacgaaaggtgggcagccgagctagctgttttaggcgctatacctcattctttgccgctcattcaatgcgttacgaggaatttgacaccggcgctgagggaaacatttgctcatttacaccagtttgcttgggttgtctttacgagcgctaatggcgtgcgcgctttttttgacctgtataaagggcagccatttacggcaaaagtagcggctgttggcccaaaaacagcacaacttcttgaagaacaagggctccattgcgattttattccgagtgaatatacaggtgaagcgctcgcaaaagagttggtcccattgcttgctccacattcggatgtattggttgtaaagggacaactggctaaaagaacggtgtgcgacatcctttcatcatctgacagacaggccactgttacagaaatgatcgtatacgatacactatgccctgctggtgccgaggaacaggcgaaacgtttacaacaaaagacatttgattacgttacgctgacaagtacgtcagcggccgtacattatgccaatgtcgcacctgcagctgggattcgcgctaaaacgattgcctgcattggcccagttacagcccgagcagcaaagcaatgcggactatctcctctagtgactgcgagcgaatatactgttaaagggctaattgatacgattttaaacgatatcgggggaatgaaacgatgaaccaaccatttacgcgccaccgccgtttacgccaaagtgccgcgattcgccgcatggttcgagaaacgacattacaagctgatgatttgatttatccgctttttgtgacagaagaaaaaaacaagaagacagaagtgccgtcgatgccaggggtctatcagttttcacttgatcgcctaaatgaagaagtgggagaagtggaaaagttagggatcccggctattattctatttggtatcccgtcagaaaaagatgcttgtggttcacaagcgtatgcggaggaaggcatcgtccagcgtgcgattcgacaagtaaagcatgcgtttccaaatatggtcgtgattgccgatacgtgtttatgcgagtttacggaccacggccattgcggacttgtgaaagagggcgatgtcctaaacgatgaaagtttagcgttgcttacgaaaacggctgtttcccaagcagaagcaggggcggacatcattgccccatccaatatgatggacggctttgtttatgcgatccgcaacggattggatgaggcaggttttaccgatattccaattatgtcttatgccgttaaatatgcttctgcgttttacggcccgttccgtgatgcggctaatagcgctcctgcttttggtgaccgcaaaacgtaccaaatggatgctgccaaccgtgaagaagccttgcgagaagcccattcagacgtagaacaaggagccgactttttaattgtcaagcctgcgctctcttatctggatattgtccgcgaagtcaaaaatgaaacaggcatgccgcttgtcgcttataacgtaagcggcgaatatgcaatggtaaaagcggccgcccaaaatggctggattgacgaaaaagcaatggtaatggaaacattaattagcatgaagcgggcaggagcagacttgattttgacttatcatgccaaagatgtagccaactggcttaaagggagctgaaagcatgggaaattggacaaagtcgattgaagcgtttaaagaagcacagccgcttatgccaggcggagtgaacagcccggtgcgggcatttaaatcagtaggcatgaacccggtttacatgaaagaggggaaaggcgcaaaaataaaagacattgacggaaatgaatacattgattatgtcctgtcttgggggccgctcattttaggacatgccaatgacgttgtcgtcgaagagttaaaaaaagcaacagaactgggaacaagttttggcgctccccacgaatatgaaacgaggcttgccaaacttgtcatcgagcgcgttccttcgattgatgttgttcggatggtcaattcagggacggaagcgacaatgagcgcattgcgcctagcacggggctatacaggccgaaacaaaattttgaagtttgtcggctgttaccatggacatggcgactcgctattaattaaagcaggttcaggtgtggcaacactgggcctccctgatagtccaggtgttccagaaagtgtagcccaaaatacactgacggtgcattacaatgatgtggagagcgtccgctatgtatttgagacgtttggagatgatttggcagccgtcattgtcgagccagtcgcagggaatatgggagttgtccctccagaaccaggcttcttagaaacattgcgaacatggacggaagaaaacggtacgctcctgatttttgatgaagtcatgactggtttccgcgttggctatacgtgtgcacaaggggaatttggcgtaacgcctgacctcacatgccttgggaaagtaatcggtggtggccttcctgtcggcgcctttggcggcaaacgggaaattatggagcaaatcgccccaagcggaccgatttaccaagcaggaaccctttctggaaatcctcttgcgatgacggcaggttattacacactttcacagcttacaaaagcagattacagcgagtttgctcgtaaagcagaacgtttggaagctggtctttcagccgcagcgaaacagcatggcattccccactcaattaaccgtgctggttcgatgattggcttattctttacagacgagcgcgtgtataactttgaaaaagcgcagacgtccgacttggatttgtttgccgcctatttccgcggaatgttggcagagggcatctctcttgccccatcgcagtttgaagggttgtttttatcgacggcccactcaaacgaagatattgaggcgaccattgcagcagcagagcgagtctttcaagcaatcgccacgaaataaacagcattcacttgcacaaaccagttgagcacagttgccaactggtttttttgtatgggcgccaaccattgcttatcatcagtccgctcctctcaccccctgtttttcgtcaagcttggccgattaggagaggccgccagatctttattaacgatttaaatagaccgaggccacgcataatcacataaactgtgtcataaacgttataatgtacaacgtttttaggacatttgagaagggggaattagagtggcgcaggagcaatcatcgacgttaaccttttccatagaagattccgtatggctgaaccaagggcaacaaattgacgaaattcttggcatgaccttaacgccagagatctttgtcgatcaagacggcgagcatgtaacgattaagggtggactacgttttgtcggtgagtacaaaattgaccgtggtgtagaagaagaacagcgcattgatgatggagaatcatttgctgacttgagcgatttccgccaatctgggcaattgactgagcatgaaggggaagttggcgagattgagcatttgtttccaattgatattacaattccgatggctcgaatccaacatattgatgatatttttgtggaaattgccagctttgactatgatctgccagagaaaggctgcatccaattgacggctgacgttagcattagcggcatgaaagcggaaaaacaggagctggaagccgatgcagatgaccgtgagttggaacaggaagaagaagcggaagaaacggctttttctttcactgcttacaaggagcctgacggagaagagccgagtttgcaaaaaccaacagtcgaatccgatgcacaacaaacagcatcagctggcgcagaaaatcctcaagaacatcgagagcaagtgttggacatctctgccgcttttgaagcagcacttgaaaacaatcatgaaacatcaccgccttctgaatcggtgtcgccaaggtcaacagagaatgaactggacgttgagcaagagaaaaaagcgtctgtggaaacgactgaagatgaggtgatagaagccgtagcagaagaggttcgttatgaggaatctcaacagcaggaagacgggctagcaggcgatgaccaagaactagaagaagaagcacttgaagaggaagatcaaaaaggtgagcgagaagaaaacgcgacgtatttgacgagcatgctcagaaatgaagtcgagcaatttacaaagtggaaaatgtgcatcattcaagaaaatgaaacgcttgacacgattgccgagcggtatgaactgtcagcaagccaattgacgcgctataacaatttagctgatgaacaggtatcagaagggcaaattctctatatacctgtgaaagcggagtaggcagacaatgattgagcaattgaaagcacgctacgggtttggagatgccactctggaaaacgatcagctcttgacagactatgggacaaaacggcttgaatactggcaagataaagcgttattggattggcatacaaattggcgtgacagttgcagcgtcacgccaactgtcttgatggatcgcatgattcgcacaaaagacggaaagccttttataaaagtggatggccggtacgtcacggttcatgaccacatcgttcctagctgtttgcaaaaagggtatgaacagcagtggggcacgctattaggagctatggtggcgaacgggaggaaggaaagcaaggatagggaagaaagggccaaacctttggcagaattggagtgcctgctgcccagcctcgagcctgaacaacaaaaggttgtaaaaggattgtggaaggaagcggagaagcgtcaggcaaaagctgaaaaactagcgcaggaaaagcaaccggtaatggctcagatcgaagcgcctgaacagtctggaattctctttcatatgcttgtagtgaaagggacgactaagcctcctgaagtaggatacggttcaatgatgcgctttttaaagaactggtacgctgaacatggacaagaatcattttgggcgttgctcgatgcattggatgcacaagcagcattgacaacgccagaaaaaaaggcgctgttggcagaagggctgcaagtgcatgagcttgacccgttgttgtcgtacgcatcaggcaatcgcgacaaagagctggcagtgttagtggaacgtgccgtttccgattgggacaaaacaaggacgtttgtttcagcatttgctaattggctagatgaaaagagggtgaaagtatgaatccgctctatgaagccattttgttttactatgatttacagccaagggcaatcgaacaagtcggccagaagttaatccgtgtagagacggaccaaggcatatttgctttaaaggagacggatattgaccgaatccgcgccgatgaatttgttcatgcgatccgcaagttgacaaagcttcgtttcaggcaatttatccctgttttgccaacgaagtttggcgagtatacgctttttgctggggataaaagctattatttaatgccgtgggtcaatgaggttgactatcaaagccgcgtctcgattgaagaaacgattgcagatcatcttggtgtcatccaccgcataacggtaaagacacagccagctgtaaaagagtcactcgatggatcgtgtgaacggttgttggctcgttgggacaggcattttttagaaatgtcccgttttgctgatcaagctgaacagaatcgttatatttcgccctttgagttaacgtttttaacccattacggcttgctggaacagcttgctgaaggggcgcgcaaccagttggaaaaatggtacgaagcaactttagaaaaacgttcctatagaagcgtgctgacacatggaaggctttctcgtcaccatgcaatggcgaccgaaacaaacgaactgttgttgtttaattttgaacaagcaagtttagacacaccagcacgggacttggccgccttttgccgacgcagctttccttacgcattatgggaagaggatgaagtgttccgttggttgcatcgctatgagcaacatttgccattgcttgattctgaaaagcatctcctttgtgcgtacttattgtatccagatccaatttattacgcgatcggcgattataggcacgggggaaacgaacttgagcatgtccggcgccttgagaagcggatcatggccatgcgcaaagttcagcgttttgtgtccaaacttgctccagccgaagaaaaaaaggaagcataagccttcagctttcactctgaaggctttttctttgccaccgaagaaataaaaaaatcaggctccatggaatataggttgtctattcatttctggcaactagttgacaattgggtgtgcattccttttttgcgttaatgctttgctgcaatgttaaagcttgaaaaacaatccgctctcctgttaaatgaaagagtctagatcttaataaaatacaacgatgaggagcaaaggcaggtgtcaatgagctgtgggcaacatgttgcgcgcaaacgatattagaacgaaagcagagaagctaagcgaagaaaaccaacttctttttgaagaagtatcccattatatctattcagcgccgatttcttcgcggcaggcgaatcaagtcctcgctgaaatcattgctgaatggcttgagcttgaacagcgccgcctccctcttcatgtacaaaagcatagtgtcgctgcttattgtcaacaacggcttttaggtataccgaagcagcctgcaaaactgaaagtagcccaagcgcttgcaacaggcatgctcattttggcggttgcctttgctgtccagacaatcgtccaatttattggcttttttgatgccactgtgcaagcgacaaaattttcattgtttcccctcgtgttactcgctgtttttggccttgcaggcatctatatggtgcatggcacaaagcaaaaaaaacgcgcgaacatttggaaagtagctggtgtcgcaagtcagctgctcgctgtgttgctgttttttacggcaatgaggctttgggatgggcttcttacagtgatattggacttcccgagtagcctgttgttccttgtgctgtccgttgtcggctggtttggcgcaaggcgccttaaatacgttttagaggaacaacaggaacaaacgcaaggtgggcaaatgccggtagccttgccacctcccccacacgctacagccactttaaaaaatacgcaggaagaggcagaaaaacaaaacaataataacagttaacacaatcaaatcaaacgtagtcggaaaaaagagggtgcgcagaagttggaaaacaataataggcggcagcacttggagcaaaatgtttttaaatccccatccttttttcggcgggcaatgtggtgggtgtggaggcggaaagccccgaaaccgtttagccatgttcatgacctcctgtgaatggtttgcaatagtttatgcaaacattgcttatttgcgtgctccaagaaaggcttcgtataaaaaacgcttatccggcaaagctgttattgacgattgcactggcaaacggtaaaatacggacatatcctataaaaagcgatgagcaggaagagtagaatggctgtgcctcaaagagagggaaaccaaggctggaagtttcctaggctacaagcgtttgaaggtcgcctgtgagctgttccgctgaacgagttagtaagcggaatcggtttttgaccgttacaaaaaagtcgagctgcacggttacaagtatgccgtgaacaaaggtggcaccgcgaacactcccttcgtcctttgagatgaacgggggtttttttacgtgaaggaggataaaaaatggaagaacagcactcgatgccaactaagtatgatccaagcgcaaccgaaaaaaaatggtatacgtattggctcaaaggaaaattttttgaggcgacaggtgaccctgataaacaaccttactcgattgtcatcccgcccccaaatgtaacaggaaaacttcatctagggcatgcttgggatgcgaccattcaagatatcctagcacggacgaagcggatgcaagggtacgacacgctgtggctgcctggaatggaccatgcaggcattgctacgcaagcaaaagtagaggggaaactccgggaacaaggcatctccaaatacgaccttggccgcgaggcgtttttagagaaatcgtgggagtggaaagacgaatacgctaagtttatacgggagcaatgggcaaaagtcggcatttccgttgactatagccgagaacggtttaccctagaccaagggctgtccgatgcggtaaaagaagtgtttgtcagtctatataacaaagggcttatttatcgaggcgaatatattattaattgggatccgcaaacaaaaacggctctgtctgatattgaagtcatttacaaggacgtccaaggggcgttttaccacatgagctatccccttagcgacggaagcggttcaatcgaaattgccacgacacggcccgaaaccatgctaggtgatacagctgtagctgtgcatcctgatgatgaacggtaccagcatttaattggaaaaatggtcaaactgccaattgtaggaagagagattccgatcattgccgatgattatgtagatcgtgaatttggatctggcgctgtcaagattacgcctgcccacgatcctaatgattttgaaattggcaaccgccataacttgcctcgtgtccttgtcatgaatgaagacggcacgatgaatgaaaaagcagggaagtatgaaggaatggaccgttttgagtgccggaagcagattgtcaaagatttgcaagcacaacaagttcttttcaaaattgaagaccatctccattctgtcggccattcagaacgtagcggcgctgtagtagagccatacttatcaacacagtggtttgtgaagatgcgcccgttagcagaagaggcattgaagcttcaagaacatgctgatacaaaagtgacatttgtgccgcaacggtttgaacagacatatatacgctggatggaaaacatccgcgattggtgtatttcgagacaactgtggtggggtcaccaaattccagcctggtaccataaagaaacaaacgaaatttatgttggcaaagagcctcctcgtgacagcgaaaactggcgtcaagatgaagacgtccttgatacttggtttagctctgcactctggcctttttcaacaatgggctggcctgacgaggaagcgcctgactataagcgttactacccgactaatgtgttagtgacaggctatgacattattgccttctgggtatcgcggatgattttccaaggcaaagcctttactggccaacggccatttaaagacgtgcttattcacggtctgattcgtgatgcggaaggaaggaagatgagcaaatctcttggcaatggcgtcgatccgcaagaggttattgacaagtatggcgctgattctttacgtttcttcttggcaacaggcagcacacctggaaacgatttgcgtttttactgggaaaaagttgagtcgacttggaattttggcaataaaatttggaatgcttcccggtttgccttaatgaacatggatggtttctcttatagcgacatcgatattaaccaagaaaagtcaattgcggacaagtggattttaacgcgtttgcaagaaacggtagagtcggtgactcgattaatcgatgcttacgaattcggcgaagctggaagattactctattcgttcatttgggacgatgtatgtgattggtacattgagatggcaaagctcgccctttatggggaaaatgagcaagcaaaacaggcaactcgttctgtgttagctcatgtccttgaccaaacgatgcggatgctccatccgtttatgccatttattacggaagaaatatggcagcatcttcctcatgagggcgaatcgattaccgttgccaactggccagtgtacgatcaatctcttgtttttgaggaagccgtagaagacatggaagcacttaaatcgctcatccatgccatccggacaacacgctcggaactaaatgtgccaatgagcaaacaaattgagctaaagatccgtccgcaagacgaacaaatggcggcacggctccaaagaggggtcgcttatattgagaaatttgccaatccaagtctgctcgatatagcggtcgacttggctacaccagaaaaggctatgtcccatgcactttcgggaatggaactattcttgccgttggctggcatgctcgacttagataaagaagtggcgcggttagaaaaagaactagataagttaaacaaggaagttgaacggattgagaaaaagttaaacaaccaaggctttcttgcaaaagcgccgtcccatgtcgtagaagaggaaaaagccaaacagcaagattacgcagcgaagcggcaaacggtgattgagcgcatcgctgaactgaaggcataacgcattttttagcccagcggccgttcgctgggtttttttcaaacagactgattaggaaagcggggatggaagtgaaaacagcagaggaagcagtacaatggatccactcgctattgccttttggcataaagccaggattaaagcgaatggaatggatgcttgaagcgttaggccacccagaacaaaggctgacggccgtccatgtcgccggcaccaacggaaaaggttcgactgtcagttttttacgtcacatccttacagcggacggcttttcagtcggcacgtttacatcgccctacattgagcagttttcagagcgcatttcggtgaacggtgtgcccatttccgatcgtgatttgcttcaagctgcccagcgcctaaagccgattgtcgaggaagtggcacagtctgaccttgggtcgccaacagagtttgaagtgctgacggcgatgatgttttaccactttgccgaagtcgctaaaccggacatttgtttaattgaagtcggcctaggtggcagactcgattccaccaatgtagtgacgcctgttttatctattatcaccatgattggtcacgaccatatgcacattctcggccatactctggcggaaattgcctatgaaaaagcgggcattattaagccaggcattccggttatttccggtgtcgaaggggaagaagcgtatacagttatttccgagacagctcgccaaataggaagtcccttgcaccagttaaatgaaacgttttttgttgagagccttcaaggacgaacgtttacatacaaagaggaaaaggacgaggaagccgttcgttatcatgctgggctctacggggcacaccaacataaaaatgccgcgcttgcccttaaagctgtttcgttgctcagcaattcactgaagcggcagatcgggaaggaagccaaggcaatcgggattgccaacacaagttggccaggaaggtttgaaattatccaagtgaatccaccaatcgtcttagacggagctcataatgaagaaggctttttagccctaacagctgctttacaagaacgttttagcgacaagagcatccatgtattgcttgcatcgacaaaagaaaaagacatgaacgtgttgttaaagccgtttgcaacaagcggccttgaagtagcattttcattcacaagcttcgacttccaccgtgctgcgaatgctgaagacctattcaaacaagcaccagtcaagcgaaagcaggtagcagctgattggcgaaaagcgctcaaaacaatgatggaaaaccttggcgagcagggtgtccttgttgtgacagggtccctttattttatttcagaggtgcggcaattgttggcttctcacaaagaaggcatgtgacgtacttataatgcagcaggctttcatttgcggctcgtctcacatgagttaaaaatggcgatattcactagaagattgaaacatttttgcaggaattaggctattttcgtcgaaaaacgaagacgaaaaggaaggagaggtgaagatgtctctcgtcatatcctgttatgctgctatttgtggagggctaatgggttcttacctccatgtagcggcaacacgggtgccactgcgcttaagtttttggggacggtcgcgttgtgagggctgccgccgcgtattagggccgtctgagttgattccgattgtttcgtatgtcatccaatctggaaaatgcaaacattgccgaatgcctctttccatctcctatccacttatcgaaatcgccagcgctggtttgtatttgcttgcctggcttttgataggtcttcgccttgaattggttgtttccattcttctcatcgctatgcttctcttagtgtcaatgactgattatagccggatgatgatcccgaatatggtgttgttgttttttgccattcctcttgtttttttgcgcttgtgtgtcgtgccagtacctttttcgtggcttagtgcaatcagtacagcaatgatgcttcttattctcgtagctgcgtgcctcaatggaagcatgggcggtggggatttgaaattatttgtcgtgcttgctattgtgctggggccaaagctgtttttgcctatggtcgcttgtgctgcttgtttggctttattatttgtaggagcgaaaacggtagtaggaaagtttgcaccaaacacggcaatcccttttgcgccatttatcagtgccgcagcattgcttgtttattttgcggctaagatttgacgttctaaaaatagacaagcctcatatagataaaagcagaaaggggtgtataaaaaatggaaaacaacaaaaaaacgatgtcttttcgctttgatcacaacgaaccactgccgcccaaaaagacacccgctaaaacgagtgaacaagaagaaagcccaccactggaagtattgacatgggatgggacgccttttcaaaaaccagaagaaacgataaacgaaagcagcagtgaggatgaatttttgccgaagccggacaaagtcattgatttaaacagaaaacgggaagaacgtggacaagaggaacgtttttgggatgatggcaaccgttcaaagtcgccaaagctgcctccaaaaaaacggaagcgtcctacaaactggacggcaaaagcgtttccgtggaacatagtcgctgctgttgtatcagcgattgtcgtcggcgtaggattaggggctgtcctctaccaatttgtcattgcaagccctgctcaagatcagacaccacaagcagtctcggtggctgctagtggccaggttgcctttccgacaatgcaagtggatgttgtgcaaggcgcagcatttgacgagccaggccaagcggagcaagtcattcagtcaacaaaagcaaaagggctgccagcgacattaatcggccaggaggagccatggtttatgtttgttggcgttgccggggaccgttcccgtgccgaagagcttggcacgcttgtgtcaaacgcaggtcaagaagtctatgtgaaaacgtatacggtcgaaggaggcgtgcctgaagccggcggagaagcagccgctgcttggttcactgacgcttattctttgtacagcgctctcgcagacttgtcctctagccagttgttagcaactgataactctcctttaaaccaagaacagctgcagcagttgaatacagcggttgcagagctacgttccaaccgtgatggggcgttttccgagttaggcgaggaagccaaaccattcgcattggcgatgagtgatgctctgtctgaagcaacagccaatcttgaatcgtaccaagaaaacgtggaagaaccactattatgggcaacacagcaagcacttttgcaggcattaagcgattatgaaaatgccatcgctgcgatcaaacattgaagaacgcttccgagcgttctttttaagattgtcgatgcccccacttagacggataaaagacacgcggtgacattctattccttattattctttctatactcgaagtttctgtttataatggtaaacaggagggatgctttgatgaaaagccgcgtatctgcagagacactatatgaattaacaacagtgacaagcccagcagtagcgcctgatggcaagagtgctgcaattgttgtcacaaaaatggacaagcaaaaaaatgactacatagccaatatttacggactggacatgcaaaaaagtagtcacgtttctcaatggacatttgggaacgataagcatacttcaccaaaatggtcctcaactggggcgcttgcctatctctcaaaccggactggaaaaatgcaagtttatgtaaaacaaggcatggcggaagctgaacagctgacagatctcgaaaatggcgttaacgcgtttttttggtcacctgacgggagcaaaattgcctttgctgcttataaacagcctgaagaaacagggacaagcaatgattggccaaagccattagtggtagaggcaatgaaatataagtcagacgaaagaggtttgtttgatggcagcttgaaacaaattggcgtaatcgacattgccacaaaaaagtggaagtgggtaacagacagccctgctgacgtaaatgtaattgacttttcagcaaatggacgcgctgtccttgtagctggcagccataacgaaaacaatgattttacttttgctgtcgatgtttggtttattgacttggatacgggagcaaaaacgcaaatcacaaaggaaccaatggtcgtgcaaagcggatccgtatcacctgatggttcttatgtcgctctcctaggccatgagagagaatacaaaaatgcgacattgacgaagctatatgtttatgattgccaaaagcaagaaatccgtttgctttccagccaactggatgcctcgattggcgacgttgcaattggggattttttacagaatattggatcaaatgggctgaaatggggagaagatggtcagtccatttatgcgcttgtttcaaaagaaggcgatgtaaatgtttggtcgtttcgcctcgatggcacagtgaatcaggtcacgcatgaaaagcgtcacataaatggatttgattttcaaaaagggcaagcgattgtgacgataagcgacgtcaaacagcttagcgaggcttaccgacttgatcttgctactggaacgcttcatgaacatacgtcattcaatgaccaaccgcggcgtacgtatgagtttagcgagctagaagaaatttgttataaacgggaaaatggcagttttgtcgcaggttggctaatgaagccgattgggtttgaagaaggaaaaacgtatccgcttgttttagaagtacatggcggtccccatgcgatgtatgcccgtacgtattttcatgaatttcaactattatgcgcgaaagggtttggcgtgttgtttaccaatccccgtggtggccttgggtacgggcaagcgtttgctgatgcggtccgtggcgattatggcggaggggacttccaagatttaatggatgtccttgattttgcaattggccaacataactggattgaccaggagcgcatcggtctgactgggggaagttacggtggctttatgacaaattgggctgttggccatacgaatcggttcaaagcggctgttacgcaacgctcgatatccaattggattagtttttatggcgtaagcgatattggctactatttttcagagtggcaaataaaagcagacttgcatgatatcgaaacactgtgggcccattcgccactcaaatacgttgaaaacgtggaaacgccattgcttattttgcacggtgaaaaagattatcgctgtccgattgaacaagcagagcaattgtttattgcgttgaaaaagcatgggaaagagactgtatttatccgtttcccagaagctaatcatgaactgtcaagaagtggtaagccgaatttgcggattgaacgtctcaatgcgatagcagattggttttccaagcggttatgacacgttataggctaagtgtttatatttgaaagcagtagcgatcgatgccgctcgccactatgtttccttatttgcgagcggttcgatttactgaaggagaacctattttagctacggtgaaaaatcgtccctcataaggcggacgccaagtttggcactcttatacgctgccttcatgtatattttctctaaaaaacagtcttgtttttccagtacacgatttggtaaactaacgaagaacctgtacactagataaaaacgatgtagaggtgacttcatgaatacctttctattagcctcaagttccccgaggcgcagcgagtttttaaagcaatgccactatcaattttttacccaaccaagcaatgtagaggaaacatttgacccaacatgggagaatgacaccattgtaaaagagctagcgaggcgaaaggcggcttcagtcgcagctaaccatccgaatgccgtcgttcttggcgctgacacaattgttgtccataatggcaagcatttaggcaagccggcgaatgtggcagaagcaaaaacgatgctcatggcattgtcgaatagcacccataccgtttatacaggtgttgccatcctacatggaaataaagaacatgttttttctgatgcagccaaagtgacgtttgatgaactgacaccagagcggttagaacgctatttgcaatcaggtgattcgcttgataaagctggagcatatggaattcaaagctttggcgccatttttgtctcgcgaatagaaggagatttttatacagtagcggggctacctctttcaaaaacagcaaaagcattggaaaaatttcatatctatccgaatatcggttaaaaggggttggatgatgacgttgcttatacgcgatgtaccacaaacagagcgcccccgggaacggtttatccgtgaaggggccaaagcattgtcaaatcaagagattgtcgcgattttgcttcgaacaggcacgaagcaaagctcggcgctacatgtagcgtctacgttattgagccagtttccgacgttggcgatgttcagtgaagcgccgttagaagaaattcaaaaagtaccaggtattgggatggctaaagcaattgaattgtctgctgcgattgaactaggcaggagaattcagagagaaaccaagcttgtgaggcccgtaatttcctcgcctgaagatgcggcagagctcgtttcagaagatatgcgcggcctacaacaagaacactttgtagcattgtatttaaatacaaaaaatcatgtgataaagcaaaaaacactctttattggcagcctcaatgcgagcattgtccatccgcgggaggtatttaaagaagcccttcaatcatcctctgcctctgtcatttgcctccataatcaccctagcggagacccaagtccaagcccggaagacatcagtgttaccaagcgtttgcgtcaagctggagccattctcggaattgaattgctcgaccatattattgttggtgatggttgttttattagcctaaaagaacgtggttttttcgcaacaatttcgtgagtttcagactttggacagatttttatgcctggggaactttaaggctatttttttttgcagttattcgatataataatgggtatgatttcatattatgacaagcgatgtttcacactatgaatacaaaaaacaaaagacacgaacctacgtgtaataaagggaggctttctgtttgatcattaggggtagcagccagcgtaatagcggctgtattttggtcggacagtacatataaaatgtttggtagcaaagatattggaatcgatttaggaacagcaaatacactcgtttatacaaaaggaaaaggaattgtgctacgcgaaccatcggtagtcgcgctaagaaccgataccaattcgattcaagcagtcgggaatgacgctaaaaacatgattggccgtacgccagggaacatcgttgccgtccgtccgatgaaagacggcgtaattgcagattttgacacgacggcgacaatgttaaaatacttcatccaacaggcgatgaagaacagctcgatgtttagtaaaaaaccggctgtcatggtatgtgtgccttcaggcattactgctgtcgaaaaacgggcggttgaagatgcgacaaaacaagcaggggctaaagaagcctatacgctggaggagccatttgcagctgcgattggcgccaatcttcctgtctgggaaccaacaggaagcatggtagttgacattggcggcggcacgacggaagtcgcgatcatttctttaggaggaattgtcacgagccagtcaatccgtgtcgctggcgatgaaatggacgatgccattattcaatatgtgaaaaagacatacaacttattgattggcgagcggactgctgaaacgttgaagttggaaattggttcggccagttccgacgacgagcaaaatggtgagatggatatacgtggccgtgatttgttgactgggttgccgaaaaccattacggtgacagccgaagaaatatccaatgcactggcggatacagtggcaacgattattgacggagtaaaaagcacgcttgagcaatcgccgcctgagcttgctgccgatattatggaccgtggcattgttttaactggtggaggggcgctgttgcgcaacttggacaaagtccttagtgaggaaacgaatatgccggtcattgtcgctgaagaacctcttgactgcgtggccattggcacaggaaaagcgttggaaaacattcatttgttccggggcaagtcaagtagccaaacaagatcggactggaagtaagggtgtaagggatgaggtcttttttctccaataaaaagcttatcgtcttactggtgagcattatcattctagtggcgttaattggattctcgatgaatcgggatcgggatttgtcagagccggaacaaattatgcgcgatgcaatcgggtgggtgcaaaatgtctttgcccggcccgcccattttgttggcgacatctatgaaaacattcaggaaatctttgacgtctataatgaaaaccaacttttgcgggcccggcttgaagagtatacgcaaatctcggtggaacgggacctcctaaaagaagaaaatgcccgtttagtcgatatgctggggattgacgaaacgctaaacgattatgatcaaatctctgcggttgtcattaaccgttctccagacgcttgggaacaatacgttggtttaaaccgcgggcaaactgacgaagtcactgccgacatggccgtcgttgattcccgaggtggattaatcggcaaagtaagccggacgagcaagtttacatcctacgtacaactgctcagcgacaatgatccgacaaaccgggtgtcggcacaagtagtgcttgaggatgacacggctgtcggcttcattgaaggttatgatgaagaaaatgatttattgatcatgcgcaaagttgacgtggaaagcgaaattgaagaaggacaaaccgtaacaacttcaggccttggcgatgtctaccctgctggtttgttgataggagaagtcgaccatacggaagcagacgaatatggtctttctcaaaatgtatacattcgtcctacagcagatttttcagcactcgattatgtgttcatcgtccagcgtcatctaccttctatggatgaagagctgcttgaagaaggtgaggcggaatgagcagaacgtacttttcgctcgttcttctctttttactcgttgtagagggctccttgttgcctaatttgcttctcaattatacaggctctgaccaaattgtcgttcctcgcttcgcgcttatcgttattgtgctgattggcctttattctggcaagcaggtagggatgttgtacgggcttgcatttgggctaatctttgatgtcgtttatacaaactatcttggcatctatacgtttggctttgcttgcctcggctatgcgcttgcggttcctttaaaagctgtaaaggaatcggcgctttgggcagtcgtgctcgctattgttgctgtttttgcgtttgaatactaccaatatggcctattttatgttttgggcgtaacagaaatgcaaggaagcaccttttttatggaccggcttttgccaacacttgtgttaaacagcgcttttgcgatcctcattgttctccctgtgcgtaaactcgctgcccatgtcttagagcaagcgcgcattcgccagcgctaaagcaggagtttggcggatcgtgtggaactagtcttgatagaaacgaaacgacaaagagataggtaccgaggtgataatggatgacacgtggaaaatcattcgtcaccatcaaaggcacaaaggatgggttgacgtttcttttagatgaccgctgttcttttgatgaattaataaaagagcttacagacaaactatcggccaattactacaaaagtggcgaagaagaacggccggtttacgttaaaatggatttgggcaaccgatatttaaatgaagaagataaagcgcagctagaagcggttgtcacagaaggccgtaatatgcggattgagcattatgactctggcgtcatttcttgggaagaagcacaattgatgaaggagcatgcgcaaacaacgactttaacgagaatgattcgttctggacaagtcgtccatgtcaaaggaaatgtcttacttgtcggcgacattaatcccggtgggcttctgacggctacagggagcatttatgtaatgggcgctttaaaagggcgtgctcatgccgggtttgaaggcaaacgagatgcccgcatttgtgcggcaatgatggcgcctgctgggttacaaattgcagacgaatcgctgtattttgtcgataaagacgaggctgtagaggatcatatgaaagcagcttttctagatgaggtgaacggtagcattcgcattgaacgagtgcagcggcttttggatgtggcagcggaaatcaacaaagaagccgtttcctagattgacaaaagaaaaagggggatgagagcgtgggtgaagcgatcgttgtaacaagcggcaagggcggagtcggcaaaacgacaacctcagcgaatattggaacggcgcttgcgctatcaggcaaaaaggtatgcttaatcgacgcagacattggcctgaggaatcttgacgttgtgatgggactggaaaatcggattatctatgacttggtagatgtagtggagggccgctgcaaattaaagcaggcgcttatcaaagacaagcggttcgaccatttgtacttgttacctgcggcacagacgaaagataaaaccgatgtgttgccggagcagttaaaaagcctggtcaacgaattaaaagaagactatgattatgttattatcgattgtccagcgggaatcgagcatggtttccgcaatgcagttgccggtgctgataaagcaattgtcgtcacgacaccggaagtgtctgctgtccgcgatgctgatcggattattgggttgcttgaacaagaaaatattgagcgcccacggctaattgtgaaccgtattcgcaatcatttggtaaaaaatggtgaaatgctagatgtagatgaaattacctctattcttgctattgatttacttggcattgttgtcgatgatgaccaggtcattaaacattcgaataaaggcgagcccattgccctacatacatcgagtaaagcgtcaattgcttaccgcaacattggaagaagaattttgggggaaacagtcccattaatggcgattgaggaaagcaatacgatgttttcaaaaataaaacggctgtttggagtccgttaaaagaatctgcctttgtgcaggttctttttttcatgtgtacggccatgtttaattgaaaaacaggcagggtatgacacaagtagacgctgttagagaaaggatgaatggacaaatgggtaagaaagtcgctgtacttattacggatctctttgaagatgtagaatacacggatccgaaagaatcgttaacggaagcaggccatgagttggtcacaattgaaaaagaagcaggcaaaacggtgacaggtaagcaaggcaatgcaaaagtaacaattgacaaaagcattgacgatgttcatgtggacgactttgacgcgttgttgcttcctggaggcttctcgccagaccaacttcgggcggatgaccgctttgtcgaatttacgaaagcattcgctcaggcgggcaaaccaattatggcgatttgccacggcccacaacttttaatcaatgcggatgtcttgaaaggacggactgtgacaggggtcaaaccgattgtacctgatctaaaaaatgccggtgcgatatttaaagatgaagaagtcgttgtctgcaacaataatttggtaacaagtcggacgcctgatgatttgccagctttcaaccgtgaatcgttaaacgtgttggcagattaaagctaccaaaaaagcgaaccgtttccatatacggttcgctttgtttatgtacgttttcttgaaaggtaacaaggacctagaacaatgctttgagaaatggatttgcaagagtcaaataccgcaagcgctgtaaccgtggcagccatgagggcttccgaatcgacagttgcagcatgccgcgcttttacttccgcttcaatcagcaactcccaaacccctgatccaactttccaatcaaaggaaatggctaccgccgataacggcttaaaatggcaatatggcaaaacagaagatgtcttttttgccgcgagcgtgcccgccgcccgtgcgttttcaagcacggaagcctcgtgcaaggcgcctcgttgcaaactttcataaaggtcgcggttcatttgcacgcttgtcttcgcaatcgcttgctgtaatgttgcatttgtttttggcaattctgttagccccgttcgagccccttcctgcttacgccacataccaaccctcttttcgctccgttccttatttatccttatcataagcgaggccttttaacaaagtcaagtttccgttcgtccatttgttaacctattattaaaatgggttgacaaaaagagtcgatctccttatagtaaaagaaaaacgaaagggaatcggaaagcatgaacttaaaacaacaaatggcgattgccatgatggcagctttaacaggggtgatgggagtggttccctctatcccaataggtccagtaccaattacgatccagtcgattgcaccgatgcttgctggtggcattttgggagctaaacggggcgcagcatcaatgatgcttttccttctccttgtcgcttgctcagtcccgattttatcaggaggacgagggggtgtcggtcatttattcggcccgacaggcggttatttatttggctggatactcgttgcgtttctagtcggttgttatgttacttacgctaagcgcgtaaacgtttggaaactaatggccgtcaatatcatcgtcggaatgtttattctctatggatgcggggcgttgtacttgtcgcaagtgacagccacatctgtcagcgaagcgcttttgcttaatatcgcttttattcctggagatacagcaaaagcagtattggctgctttcattgctgtccgtgtccgtcatgccttaggggaaggaactacagaaaaggttatggcagaaaaaaggagcgcctaaaaaagctcacgcaccgtttctacgtgcgtgagctttttttatgaacggtgttgcgtgtattggctttgtttggtgatccgttcgatgttgtcgatttctgtctgtaacattggcttttccttgcaagagcgggcattttgtcttagctgctctatagagctggcaccagctacaactgctgctactggcggatgggccaaacaataatcgaaagccacttttgtcaaagagtatgtttttccgtaagtttgcataaggacgtcgcgcaattgttcaatttctttgactgagtaatccaaataaccatcagaagcagcagcaaccgtatgtaaggggcgttcgcttaaaatcccttttgctactgggccacgggcaacgacgctaatgccattttcctgtaaatacggaaaccattcttctggtcgcctgtctaaaatgctgtattgcatcataatcgacacaatggaagactgctcaacatatgtgcggatcacattggggcgaatcgaggaaatgccgtattcgcgaataagcccttcctgttttagttcctcaaatgcttcaatggtttcatcgattggatcatcgatggttccgccgtgtagttggtacaagtcgatgtaatctgtttgcagccgttgcaagctcgcttttgctgcttccttaatatattgtttcgaaggatcccactcccagccttgtttgcccttttcaaaacgattgccagcctttgtagctataataaagtcggggcgttttccttttaatgctgtgccaattattttttcattctccccataatcgtacaaatcggccgtatcaatataattgaccccaaagtctgccgcctcagcgattatttcggttgcacggcgtttatctgtccctagcgacatcgctccaaggccgagttcgcttacgtagagctccgattttccaagttgccgtttgttcatcgttatcacccctacttttgtcattcccgcttttctttattattaacctgaatacgagttagggacaagtcataagatgtacaaatcgatgagaggggcctgtaaaatggatagaaggaaaaaaatccaaaaaaagatcgccgctagaaggcaagctgctccaaaacgaaacattgccttaaatgaggcgccgctttctcctgaaaaaggtgatgatttgctgtcacaaaagcgccagtcaggaatacgccgttttattatgcaattggccatctccggatgcttgttttttacgatcggcattatttatcaatcaggcaatgagcgcgtacagcctgtgcaagcatttgttgaacaaacatttgaccagcattttcaatttgctgctgtttctgctttttttgaaaagcatttagggtcgccccttcatttgcttccagagcaacgtgcctctgaagaagaaaaggaaccacttgattacgcttttcctgcatcaggtgttattcgcgaaagctttgataaagacggcaaaggcattttgcttgaaacaggactaggcgaagaagtaaaggcagttaaaggaggccatgtgattcgtgtgacgacaagcaaagaatctgaattgggcaatctgattgaacttcaacatcctgatggcacatcctcgatatacggtatgcttgatgatgtttctgtccatccatatgatattttagaaagcggagcggtgctgggaactgtatcatctgatgaaaatcaggcaggcatcttttactttgccattcggcaaggagatgactatattgatcccagcgaagtgatgaattttgattgaacttattaaaagagttcgcgtacatcccctattttggctcgtcattgctgctggcatcatcactggtcattttaaagaagtattgatggtgttcgtcattgtatttgtccatgaaatggggcattcagtagcggcctatatgcttaagtgggatattaaaaaaatagagcttcttccctttggcggcgctgcgcaagtggaagaaaacggaacgaaaccaattaaagaggaactggccattgttttggcaggaccgctgcagcacttatggttatgggcattgtcttttgccttggttgggcagcctttttggtctgagagcgaccatgaactgtttgtggctcataacgccgcgattgtcttgtttaatttgttgcctatttatccactggatggcggaaggatggtgcaacttgcttgtttagctgtttggccgtacaagcgggcgatggcagctagccttgggatttcggttggattcttggccgtagccctgtcaatgatgctgtttttgccctttcatcttaatttgtttgtggttctttctttcttggcactaacgaatggattggaattcaagcagcgaaactatcgatttatgcggtttttaatggcgaaacaaacagatcgtgcgatgaaatctatacatgccagagtttctgggcagctgcccattcgtgatgctctggcgcttttacggaggggccaagtgcagctgtttgtaatagaagatggcggcacacggtacacaatagcagagaaagagcttttgcaagcttattttgcggaagcgaaacttcatgcgccagtaaggacattagtgcctccagctgtgtaacaattgtatctccttttggcttcgcgtaaaataagatacaagccaaaaaggagcgtaaacatggagcaatcgattgtcattacgaaaggaatcaataaacgcgaagccgtccttttggaaaacaacgaggtggttgaatggttttttgaaagcaatgaccgcccccaaatggttggcagcgtgtttttaggcaaagtggaaagagtccttcctggcatggaggcagcttttgtcgatattggcacgggcaagaacgggtttttgcaccgtgacgagcttctcgcttttcatcttgacccgagtgacttaacggaaaagcaaacaaaaagcatctcccagtttgtatcgccaggcgatacaattgccgtacaagtgacgaaagaagggacgaatgagaaagggcctcgtttgtcaggcgttgtgtctatcccgggaaaatatgttgtttatatgccagaaggcgcgtatgtcgccgtatcacggcgcattgaatcagaatatgtccgggcttcgctacacactgctttagaaaacaagcttcagcacaatgaaggggcgattgtccggactgctgctgcaaatgcgccgattgaagaggtagagcgtgacttggtgtttttgcggacactgtggcaaaaaacgctccgtcatcaagagcaggcgccagcgcttatttaccgagcagctactttagtggagacgttgctattaggctatctcaatgagcaagtcacagaagtggtcgtcgatgacattgatgattaccgccttatgaagcaactagttcaaacagacgataaagacaaggttaaactgtacgcgcacaaaggttcttcgttccagtcagcacgaattagcgcccaattagctaaagcgcaaaagcgtcgaatttggctaaaaaacggtgcgtttctcgtcattgacgaaacggaggcgatgactgttattgatgtcaatacaggcaagtttaccggcaaatttgcgcaaagcgagaccgtactcgctgtcaacaaactggcagcggtagaagcggcgaagcaaattcgcctccgcaactgcagcggcatcattgtgatcgattttattgacatgcagagtgactcagaccgcttagctgtccagcagactatggaacgggccctaaaaaaagacagggtcaaaacaagtgtccgtggttttacaaaactaggcttgcttgaaatgacacggaagaaaacacgcctatcgatggcaaaaacagtaactgttgagtgtaaggcttgtgcaggcacaggcgctgtgcttgcaggccatggccacgcttttatgcttgaacggctcatattggaggagcaagcggaagcgctcgttgtcgccgtaacagctgaactgcggtcgcttttagtcgggggtggcgacctgtataaggagcggcttgagtcattggccggcgtaacgttgtttctcgtaacagataactcattgccacaggccaagccttactcgatcgattttgctggatcttatgaagaagcacagaaacgctttgacaccatggcacaagcaattgactaggaaagtcatttatgctatgatgaaacttgttggtgatttggagaagcacccaatgaacttacaaccgcgcagattaggcgttaaaatggcatgtcctgcctatgatggcgagtctgatgttatgaggaggtgcaaacagtgtacgcaattattgagactggcggaaagcaaattaaagtagaagaaggccaagaaatctacgttgaaaaattagacgcagaggctggcgaagaagtaagctttgacaaagttctttttgtaggaggggaatcggcgaaagtcggcgctccgtttgtagaaggtgcatctgttacgggaacggttgaaaaacacggtcgtaacaaaaaaatcatcgtctataaaatgaaagcgaaaaagaactatcgtcgcaagcaaggccatcgccaaccttacacaaaagttgtgatcggaaaaattaacggttaatcccgatgatttatgttcgcatgcaacataatgagcatgacgatatcatcgcttttacgatgagcggacatgcagaagctggcccttacggccaagacatcgtctgtgccggcgcatccgctgtttctatcggaacggtcaatgctgtccagtccttatgtggagttgatcttgttgtcagctcaaaaggagaaggtggctatcttgactgcgctgttcctgaggggctcgatgtacggacatatgaagatgtgcagctgttgttaaaagggatggaattatcatttttgtcaatggctgatgcgtatcaaacgtttattacggttgaaatagacaggaggtgatttccatgttgaaaatggaccttcaatttttcgcttcgaaaaaaggggtaggtagcacaaagaacggccgtgactcccactcaaaacgcctgggtgcaaaacgtgcagacgggcaagcggtaacgggcggttctatcctcgtacgccaacgcggcacacgcgtatatcctggtgagaatgtcggcaaaggtggcgacgacacattgttcgctaaaattgacggcgttgtgaaatatgagcgtgtcggccgtgaccgcaaaaaagtaagtgtatacccagcataaagctaataaaaaacagttctttttcataaagagctgtttttttaattggttctatgtgaaaaaatgattaaaaagtactattatttttagcagcttttggaatagatttccgtcttaacactaatttttcctattaggctattaaaagcgaaaaagatgaagtaaactagatttatacgcataaaaaggaagaaataggaactgcttaagaaggagacgtgaagaatgaaatcaacaggtatcgtacgcaaactggaccaactaggtcgaattgttatcccgaaagagcttcgcagcatgctgaatattgaaattaaaaccccgcttgcgatactaattgatggcgaccaaatcgttttagaaaaataccagccatacaaagcatgtatggttacaggcgaaagttctgatgaaaatttaacacttgcaaacggaaatattgttttaagcaaagaaggagcagagcaaattattaaagaactgcaacaacagcttgaaagcaccgcaagccgctaaggtttcggtgtttttctattgccgaaacattgtatactaaaaagaactcgtataggaagaggggatcgaatgaaagcgattataaacgggctcgtatggacaggcattgcgaatcagccagctgtccctggaacggttttggtggaaggcgcctgcataaaagaagtcggccttgatgttgtagtgccagagggggttgaaaagatcgacgcgaaagggggctgggtgacgccaggcttaattgacgtacatacccacttaggcgtccacacacaagggctcggccatgatggccatgatttcaatgaaacaacggctgcatgcacacctgaagtccgggcgatcgatggcgttaatccgctagacccaggttttaacgacgcccgcaactctggggttaccactgtacaaattttaccaggaagcgccaatgtgattggcggcgaaacatgcatcttaaaaacagcaggccgtactgttgctgatatgaccgttaaagccccttctgcgatgaaagctgcactcggggaaaacccaaagcgtgtccatgggggaaaaggacgagcgccagtgacgcgtatgggggtggctgccgttttcaggcaagccttaatgaacgcccaagactatgccgaacgaaagcgtgctggaaaattagaaaaacgggatttaggaatggagcagcttgtgcctgttatcgaagggaaacggccgatgcgtgtccatgcccatcgtgcagatgacataatgaccgttttacggattgccgatgagttttcgttgcggcttacaattgaacatgcgacagagggccatcttattgctgaagagctagcgaacagtggcgtgcgctttaccattggtccaacgttctcttctcgctcgaaacaagagcttgccaacaaaagttgggagacgattcaagtgtttgctgaaaaaaatgtgcctttttcgataacgacagaccaccctgttattccgattgaacatttgttaacgactgccacttttgcattaaaatacgggattagcgagcagcggatgttggaagcgattactgtaagggcagcagagcatcttgatatcgacgaccgtcttggcacgattgaagcaggcaaagatgcggatcttgtcatttggagcggttcgccattgcaagcgggtacggttgtaagagaaacgtttataaatggggaatccgtctatactaattaagtagaccgatttagtggcttcttaagaaggaacaaagcgaagatggaagaagacagctcggtgagcgtctgtgttgtctccattgctaaacacggagcgggcgcagatgctggcttgcgataaagagaagctgcttcgttagaaggaggaacaagtcgtgtgtgcctgtactgattttgaacaagcggatatggacggcttgtataaacggtttatgcaagctaaaacggaagaggaacgaaaacgttgcgtgaccgaaatggcattggctattgaacaagcccggttaaaggagcaagggaaaagccatgattagcaaacagttacaagaactagggaaaaagcgaatcgctccgtatccgtgtgaaggctttctcctcggcggcggaaacgaggaggctgacgtcttgtttgtcggggaagcgccagggcgtgatgaattacaaacgcacaagccttttactggcagagcaggggcgaatttgaatggttttttaaaagaagcgggcataaaccgagaggacatttatattacgagcgttgtgagaagccgcccttataagcatgatgttaaaagcagcaaaaagccaattgaggagcgtggaaaccgaacgccgacacaaaaggaaatcattgcccacgctccccttctcgatgaaatgatcaaccaactggacccgaagctcattgtaacgttaggggcaattgcccttaaacgccttgtcggcccgggcctcaaccttcaagatgttcacgggaaaccattttgtacccgtttgctgcaattgccatcgcttgaatctagcaaactagtacgaggagagcggcaacaacatgtttttccgacattccatccggcttctgtcttttacaatccaacattagcaacaacgattacaaacgatatgcggcaattgcgggccgtgctcgactcgttacatgaacaagggtgaaagaggttttcccgtctcatcagccctattaggaagataaaattcgacgcttttatcgattgtcttgaaggatggtagcgactttgtagtcttcaggatcaagagacatccgattgccaagcatttgctgtgcaagaagcatgccaatataaggcccagtcgttaagccacttgagccgaggccgttggcaaaccacacgtcctctacgccaggaagcaagccgaagaccggttggaaatgagggacgacgggacggaacccgactcgcgtttcaagccattctgctttttgtaaccctggggcaacattaagagcattggccagtatcgtgtgcattcccccagcagtcacggctgtattaaagcggggataatcctcatgggttgtgcctgcaacgatgcggccgttctcaaaagcaagcaaataggaatttccaggtggcatgactactggccattcatctgtgtttgtttcgagatgtaaatggatgatttgtgctttttgttcccgcacgtccacggcaatgccaacgggagcgagcaactcttttgcccaagcgccgcaagcaacgaccatttcatccccttgcactcgttttccgtcagcataaacgctgagcttacggggtgattcacgaacaagcgttgcttttgcaggaataagggtagcgccaagattttgggcagcttgttgcagggctttatttaagctagagccgtcgacacgcgctgcgccactcacatgaacggcaccaaaatcgttgcttaggggcggaaaaagcgtttgcgtttcagaaggggacaaaaccgttagttcacccatttctggtgcatcggcttgtttttggcgggcccgctcataggcggctgcaagttcttttgaatcttgatggagccacaatgcgcccgtttgcttatagcctgtttgtttttgcccaagtgcggccaactgcttgatcaagtctgggtagtaagcggcgccttgtttaacaaggcggtaccatttttggttgcggcgttttgaaagccaggggcaaacaatccctgctgctgcttgtgtcgccttcccatgatggttgtcgtcaataagcgtgacagacgcaccgtttttagcaagatggtaggctgtggaacttcctaaaatgcctccaccaattacgacaatttttttcataaacaggagtcccttctgttcgtcagtagtcctttttgagcgtaacgaaaggggcaaacggtgtcaactgaatgaaggtctttagtagatttttaacaaaaggttcaagactgtgccgtccatacataaactaaaggagcaatctgtgacgggaggaaagcgtgtgaaacaggtaatcatcggcattacatcgtctattgctgaagaaacgttgctcagcacgacgcttgcaaatatttggtctgtcaatgatgcggaagtgcttccagtcgtgcttccaaacatcgcggataaagctgagcattatgccgacatggtggatggcgtgctgcttacaggtggaggggatattgacccagcgctatttggagaagatcctcatccgttgcttggggaaatcacaccggaacgggaccagtttgaagtggcgttaacgaaagcgttgctggcgcgaaacaagccacttctcgccatttgccggggcgtacaaatattggcaattgctggaggcggggatatgtaccaagatttgccgagccaatttgcgaagccgctcattcaacatcgccaacatgcgcctcgttcctataaaagccatcagattacaatcgggcaaggcacgcgattggaaatgctcgcaaaaggaaataccgcttacgtcaacagttaccaccaccaagcggtcaggaaagttcctgcaggttttcaagcttcggcttggacaaatgatggtgtgattgaggcgattgaaaacagcgctagctatccttttcaagtcggcgtccagtggcacccagaaacgttagtagacgatgaattttcaacccgtttgtttcatgctttcatcgcctcctgcaaatgacaaagattggcgtggcttgtgattgtcaagtataatgaggcagttaaggggggagaagcatggattcatctgattacaaacgtctcgatggtgtagcgttggctgagctcattcaagcaggaaacgtttcaccagaagaagtgctcgatgcccattttcaagttagctacgaatgggaaaagctgaacgcgattgtctcaaagcgtgaaaaggaagtgtaccaagaagcgaaggaagcagccaaaagcggtgtgttttcaggcgtgccatttttgcttaaagatagctcccacgccttaaaaggggcacggctcacgtctgggtcggctttatttaaacaggagcgagctaaagtgactagccactatacgaggacattgcagcaagcggggttgcttatggcaggccataccaatgcccctgagtttggcttgaaaaacattacagaacctaaactccatggcccagcacggaatccactcgatctagactattcgccaggtgggtctagcggtggggctgcagcggctgtcgctagtggcattgttcctttggcgggagcgagcgacggaggaggatcgattcgcatccctgcttcgtttaccgggcttgtaggcttaaagccgacacgtggccgtacgccagtcgggccaggtgtcggcagacaatggcaaggagcggcaatcgattttgtgctgagccgctctgtccgcgatagcgctcgagcattggatgtgctgcaaacagtccaatgggaagccgcttttcaaacaccattgtttgcaaatcgttatgaacacacactccaggagcaattgccacgtttgcggatcgccttttccgcccaatctcctgttgggactcccgtttcacaagaagcgattacagcattgcaacaggcagtccgttggctagaaaaggcaggtcatcatgttgaggaagcagcgccgccaattgatggcgtcgagctaatgaggcattattatttgatgaatgcaggagaaatgtctcgtttgcgccaacaactaggccaagcccttggccgctgtctaaatgaagatgactttgaaatggaatcatgggtattggcggagtacggagacaacgtccgcgcagcagaatatgcggcgagccttgctgcttgggacgatgctgcagcagctacccattggttccatgagacatacgacctctatttgacgcctgccacggcgagcgtagcgccaaggattggtgaattaacaccagcgcctgcacaagagcgttctttaaaagcgcttgtccaggagttgccgcctaaggaacagcttgatctagtctatgaaatgtttttgccaagcttgacgtatacgccttttacccaactagccaatttaacggggcaaccggcgatttcaatgcctttgtttaaaaatgaaacagggcttgccatcggcgtgcaagcaatggcacgaaaaggagaggagcaccgtcttctccaactggcttatgcgtttgaacaaagtgaactttggcaagggacgcagccgcaataaagaagcttacagctggccggtgcctttttaaaacaaagtgtgataaacagtggacaagctttagcacagaagtggaaatgttgtatacttctcttataggctagatgaaagggtgattcaatgtatcgtacagttaacgattttttgcaagagtggcaggaagaagcagacttgacaaagtcggtaattagtgccgtgaccgacgaaaagaaaaaccaagcgattgccgaagggcacaacacactttcttggcttagttggcatttggcgacaacgccagcgttttttgccggaggtgttggcttggcgctccacataagcgctgatttgtcaaacgagcctccatcgattaaggaaatagtggaaacctatgaagcagttaccgctgaattagcaaaacaagcaagctcgttaagcgacgaagcgctcgaagagcaagttgactttattggagctaaagtagcacggggtgtgattttacggaaactagtgaatcatcaaatccatcatcgcgggcaaatgactgttttgcttcgccaagcgggtttgaccgttcctggcgtatacggcccaacgaaagaacagcaactagggtagcagaaataaaggcagtagactgacgttgaaaggtgaatggattagcaaaaacatctgtacgcaaagtttgtctgcagtctggagcaacggcatgtccgttgcttttttttatgcctttttctttccattaaaatatagcggtgtttgacaccttgcatggtgacggcattcatgctgtcatctcccctttacaaaaccttaacattagccataaataagcttaatactcgatccttatacttacccttgtaagacgtaaacctatatagggggagaaacgttaatgaaaaaagtccaattaggagcagtatttgcgtcgtttttgtttgttgccaccgcttgcggaggcggaaacgcaaatgagccagcagagacagattcggcagaaggcaataatactgaagaaaacgaagcgtcaggcagcatcttagtgtcaggctcaagtgcaatggagccactaattgcagccgcaagtgaagagtttatgaatgaaaatatcgatgcaagcatttcagtgcaagcaggtggatctggccaaggactgtcatctgttgcaagcggacaagtccaaattggaaactccgatgtgtttgctgaagaaaaagaagatattcccgctgaagaacttgtcgaccaccgtattgccgttgtaggcatggggccggcaacgcatcctgaagtaggcgttgaagatatttcgactgaagatttaattgctgtatttacaggggaagtaaccaattggagcgaacttggtggcgctgaccaagaaatcgtgattgtgaaccgcccagattcttctgggacgagggatacatttgtgaaatatggccttgaagacaacgagcctgttccaggagacattacggaggactcttccaatgccgtgatgaaaatcattagtgaaacacctggggccatcggttatctcgctttctcttattatgacgaacaaggaacggttttgccgctttccgtagatggcgttgaacaaacagatgaaaacgtcatttcaggtgaatacccaatttgggcgtatatgcattcttacacgaaaggcgaacctgaaggcttaacggcacagttcattgagtatttgcaaggtgattttgtacaaggcacgttgatcccagaaatgggctacattcctgaagcggacatgcaagttgaacgagatgcggaaggaaacgatacaccaaaataataaagaaaagtgaagaaggtcgctgccggcaaggtagaggccattctcacgtagggcaaaaacagggcaaatcatgagggggaaactgtcatgccgtcttctcaatcggtagcggaccgtttgttaaaagcaaacaataaacaagcagcaaaagctgaacgcaaaggaaaaatcatcgtttacgcctgcgctgcgctcatcattattacaaccattgcgattacgctgtttcttgttattcgtggactgcaagcatttgtaatcgatggcgtcagtccaatcgagtttttgacgagcttagattggaacccgactaggggagcggacgccggtgggccgtcttatggcgcgctaccgtttatttttggttcatttgctgtaacgatcttatctgcattgatcgctgctcctctcggaattggcgcagcgatttatatgacggaaattgcgcctagctggggcagaaaaattttgcagcctgctgtagaattgctcgttggcatcccatctgtcgtatatggttttatcggtttatccgtcattgttccgtttatacgcgaccatgtcggtggccaagggtttggcctcctatcagccatgattgtattatcgatcatgatccttccaactgtgacaagtatatcaaccgatgcactgcgttcgattcctggcggtttgcgtgaatcgtcgttggcgcttggcgccacccgctggcagacgatctaccgggtactcattccagccgctggacctatgttgcttacagcagttgtcctaggaatggcacgtgcatttggcgaagcattggccgtacagatggtcattggcaactcgcggacaattgcagagtcgctcattgattccacagcgacgttaacgaccatcattacattaaatatgggacatactgtaccaggaagcattgacaacaatgtcctttggtcactcggcttgattttgctcgttatgtcctatctgtttattattcttgtacggttcttgtcatctaggaggaaattctcatgaacaaaaaatgggcggataaatgcgcaacgtctatgtttacagtcattgccgcaatcattattgctgttttagctggcttaattggctatatttttgtgagggggcttgcccaaattgactgggcctttcttacaaacccaccaagctcctacagagctggcggcgggattgggccacaattgtttaattcattttacatcttatttttaacgatgttgtttaccgtgcctcttggacttggcggaggcatttatatggccgagtatgcaaagccaggacgcgtaacggattttattcgtacttgtattgaagtactcgcttctttgccatccattgtcgtcggtttgtttgggttgctcgtatttgtacagctaactggttggagttactcgattttaggcggtgcgcttgcgctgacggtgtttaacttgccagtaatggtccgtgtggtcgaggatgcgatcacgagcgttccgagagagcaaaaagaagcaagccttgccctgggcattacccagtgggatacgattcggaccgtgattttgccagcggcgtttcctggaattttgactggtgtaattttgtcggcagggcgcgtgtttggcgaagcagcagcgttgttgtttacgtcaggcgttacgacgccacggcttgattggatgaatttgaatcctttttcggaaacatcgccattaaacgtattccgtcctgctgaaacactcgctgttcacatttggaaaatcaatacgcaaggcttgatccccgacgcgcgggaagtagcagacggggctgcgcttgtgctgattttcgctgtgttgctattcaatttgttggcccgtttgcttgggcgctacgtgcaccggaaactaacggcatcgaaataaaagggggaaagccaacatgactgctctgaccgttccaaaaaaagatactactgcacttaaacagccatccaaacaggctgaggcgattttacaggcaaaggacatcaatatttactatggcgaaaaccatgcagtaaaacagttgtcgcttgatattaacaaaaacgaaattttggcgttaatcggcccgtctggttgtgggaaatcaacctttttgcgcagcattaaccgcatgaacgatttaatcccgagcgcacgggttacgggcacccttgcctatgaaggacttaatttgctcagtgatgatgtaaatgtggttgctttgcggaaagaaatcggcatggttttccagaaggcgaacccattcccaaagtcgatttatgagaatcttgttcacggtttgcgcttccataacgttaagaaaaaagagtgggctgacattgtggaggattctttaaagcgtgccgctttatgggatgaggtcaaggataggctccatgaatcggcgctgtcactatccggcggccaacagcagcgactctgcatcgcccgcacgcttgctttaaaaccagaggtgattcttcttgatgaaccagcttcggcccttgacccgattgcaacagctaaagtggaagaactcatggttgaattgaaaaagaattatacggttgttgttgttacacacaatatgcaacaagcgtcacgggtttctgaccggactgcgttcttctacaacggtgagttgatcgaagtcaataagacagacgtcctatttcgtaatcctgaaaagaaacagaccgaagattacatttcaggacgatttgggtaagggggaagaagcatatgcaagcattagctgaacaaacggaaacaaagaacgtgtatgatgttcttgactttaatctttggtacggcaacaaccaggcattaaaaaacatttcgcttcaattaaaggaaaagcatgtgacggcgatcatcggcccttctggttgcggaaaatcaacgtttatcaaaacattgaacttaatgtcgcgtttaaatcccgatattcgcatggctggtgaattgaattttcggggcgaaaatttgttgacaacttcaatggatttggctgagctgcgtaaagcggtcggcatggttttccaaaagccgaatccctttccaaagtcgatttatgaaaatgtggcgtatgggccacgcattcatggaattcgcaagaaaaaagaacttgatgaaattgttgaatcaagcttaaaaggcgcatttttatgggaggaagtcaaggaccgactgaataaaaacgcactgtcgttatcaggtggtcagcagcaacggctttgcattgcccgagcactggcgacaaagcctgaggtattgttaatggatgaaccgacaagtgcccttgacccgatttctacgacgaaagtagaagaactgattacatcgttgcgtgattcttatacgatcgtcatcgtcacacacaacatgcagcaggctgcacgaatttcagacgagacagcattcttttacatgggcgaactggttgaaattggtccgacacaacgaattttttccaaccctgagcataaacgtacagaagactacgtatctggccaatttggctaacaggaggtcatcctatgttaagaagcatgtttcaagaacagcttgatgaagtagcagggcgaattcaagtgctaggaaccgccgttttaaaacagctggatgctgctattgatggtttgtcaacaaagaaccgagccgccgtccagcaaattattgacaatgatgccgacatcaataagagtgaacttgacatcaacgaaaaggtgtttgacattattgctaggcagcagccagttgcaactgatttgcgacggttgatcgttgtcatgaaaatggctggcgaccttgaacgtgtagcagactttgctgtcgatattgctaaagtgtcaagacgaattgatgtgttccctaacgaagagttgaagcaagaattgatagagcttgctttagatgcgaaggggatgatcgaaaaagcactgcatgcttatgcaacaaaaaatgtgcttacagctcaacaattggcaaaagccgatgatgaaatcgacgaacgctttggtaagcttattaaaaagctgtttaggcaagagacgacagatcaagacgtagaagcgattacccagttggcttttattgcccgttatattgagcgcattgctgattatgcaacaaacttgtccgaatggatcctttatgaagcaaacggacaatatgttgatttaaactgacaagattaaccagactgatcgaaaacgtttgtctacagtctgaagggagctgccttaggcaagctctctttttttcgtcggtccgctgttatcgtatggtataatagacaaacgtttagacgagaaaaggcaggcgttaacgatgatttccgcacaagctttccgagtaattgctgctttccatagtggggtttggatgctgttttttattggcgctgctgtttggcttctgttcacatggcgaggatggcagcacgcccgttttctttgcgcttcctttgtgcgaacaacggaagcggtccttctgttgtctgggtttttaatgtggtatgcgtacgagtttgctgctttttacgcagtcaaaggcgcaattgcaattctaatgctctatttctatgaaaaaacacgtttggcgataaagaaacaacaatataggcagctatatccgcacggggtattgcttgtcgtaacagcagtcgtcgtttgggcgatgggcgtctattggaaataaagggggatgaatgatgaaggcgcatattagggcggtcagtgggtggcaaccgttctcgccaaagcgctacggggaatgggcacgtacacaacgggagaccggttgttgtattgtgccgacgacgtattgggtggagcaaatccggttggtggcgccagaacttcgctgcttaacatttgactcgtttatccgcaagtgccagcaacgagtaaacgatatggagctagttcaccacgaatggaagtgggcgatggcaaacgaagcgaatgcgactggaagaaaaaacgagcaaatcataaatagttatttgcaatataagcgttttggcgaatgccgactacctgacagtttacgctttttaaaacctgaatttgcaaagatcaaggctatagaagaaaagagacggtggaagacaattgaagatgactacaacgcctttgctcgaaaaccagcgtctttgccttatgatgacattgtagtcgaagggtttcatgatttctctgtcaatcagctagaggcactagagcgaatggttaaagagggcgtggggctgaccatctaccttaatcgagaggcgaaagctgcgatatcggagttagtgaagattggctttacggtggaggatgttgacagacagccagtcacggatggtcaaacagggtgtttgtctctgtataaagcggtgaccgaggaagaagagcacattggtttgattgaacatattcttacaagcaatacgccgctgtccaacatcgctgtgctgtttacgaaatcagacgcgcgtgccgcttttatggcaaaggcgaagcaggaaggactgcctattgccgctagcaaccgtagttatttggcggacacccctttctatctatgggtcaaagaagcgctgctcacccctttgccttcaaaagaagcgcgactgggggcagttgattccctctttgctgtgcttggcattactgggcgtcgttgcttaagagcgaagcaggctttgtacgctggttatggcactggtgacagcgaggttgacttttttctgaaccaaatcggcaaaagcccccttgccgaagggaacacgatagcagaaaaagctgcgttgctcgttgacatgctaaccaaaatggaagagcgaacggatatcccgtatgcccccacagtaaaacaagcgcttttggccctggacggcatctcctatgcaaaagtggaaacaacggaagatgggtttcgccaatggttccagacatttgcgcaaacacttgtcattggcgaggagccaaaaccgaaagagggaatttccgtcctctcgtgggcggatgtcgctgcctttcaagggtcgaccgtctatgttgccgggcttgctttaggtacgtttccacatccttattcactgctaggttatttccaagaaagtgatttaacggagattaacaaacggggggtgccattgacatcccgtacacgttccgtccaagcgttgcaattccaacagctcatcaacagcggcatggacgtatatgccagctatgtgtgcggtcttgaccgagacagtccagcgctaccttctccatttctactcgacttccaactagttggtttctggaattaccaagataggttgaacaacggaatcggcacatattcacgcaaagatgggactgcttaccgcggtgaactcggtcactttcaaaaaaggctgcaacatttgcaattagggcaagaatggctttcagatgcccaacaggcgaaagagaaagcaaaacccgctgttgccgttactgcgtttgaagcttatgcgcgctgtccattccgctatggtctagaatggcttttagggatcaagccgccagcagctcaaaacgaagggcttccggcaaataagattggaacacttattcaccaatgcattgaaacattgtatcgccataaattgaatgtcattggcaagcctttttccaccctttcggaagcagaaaaagacgaagtgcctcattggcttgaatcagaatggcgccgccgctttaatgaggatattgtgccatttgtcccatatatgaatcgtttcgagcttgaacaggaagaaacatggtgggccaacaagcttcgtctttggtgggaagcagagcgggcgcggttttgggatcggaaggagttggcggatgcttacattgaagggctggaagtgcctattgttcttgaaaactttccgttgggcacaacgaaactaaaagtgactggaaaaatcgacagggtcgatgtcgcaaacggtgaaaaggtactctatgattacaagactggcaaggcggcattgaaactggaggaagcctcacacggcacaaaactccagcttcctatgtattcgtatatcattggtaagcaatcgccagtagctggggctacatatatttctttgcttgatccaggaaaacgggcagggaacggggtttggaagccagagcatgttggcaagcaatcgatctttggcgtcagtgctcaatgccgcaataaagaggacgctttaggagaagaggcttttatggaaaaatggcacatccatgagcgtcttcaagaactgtgggaaggaatgcagacaaacatgcccgttgccccccttgattgcgcggccagctgcccttataaagcgatttgccgagtgacggaagaacaaaaaagggaggctcagcatgcaattcaacagcgcacaaaagcaagcaattgagtcgaaacagccccttgtcgtcgttgctgctggagctggttctggcaaaaccagggtgctaacggagaagatcgtctccgttatcgacgaacattttcatgacaaggactcaaattatggcgctcctattaatgaaattgccgccatcacttttactgaaaaggctgcgagagaaatgaaagagcgccttgcaagccggatgggcgaaaaggcggaagcggcaggaaatagggaagaaaaacgcttttggcttgcacagcaagaagaagtagagacggcaatgattgcaacgtttcatcgtttttgccggcaactgcttagccgttatagccgatacgttgaagaaaatggggaactggcggttcttgatgaaaccgaagctgcaatgataaaagcggagcttgttgaacagttgtgcaaagagcgtcaatttgccaatgaactgaaccaactccgtcgggggctgtctctttttgcattgaagcgttcattggtggcggttcatgatgcggttcgagaacaacgagcgggggatgacgtcatttcccacttttcgccgctgtatatgtgggacaagcaaatcaatggggctatttgcgaacagcagcaacaagtggcgatgatcgtcaaggcggttaaacgcgctgcaaaagaattacctcctttgtctcagttatcgaaaaccgaacaaaagcatgcacagtcgctgaccacgcttgcacaaagtttgcaacttgctgcaaacgaggaggaagcggttgcgatgatgaacgaagcgcttccaagcagggtccaaaaagcatggcaagaatcgttgccgtctctgtacgttttttatgagcacaactggaagccattcaaaaagcaatggagtgaaaggaatcaagtcgccagtgatcgagggctgcctttgcttaaagcgtttgtgacgctgttgcaagcatttgccaaacgctatgccgatctaaaagcacagcgccttgtcgctgactttagcgacttgcaacaaaaagcgtatacactattacaactaccaaaagtagcagcagcttgtcagtctgcttatacacatattatggtcgatgaatttcaagacacaaaccaagtccaattgcaaattgttcaggcgatcaatccggcccatttgttttttgtcggcgatgaaaaacaatcgatttaccgttttcgcggagctgatgtcgctattatgaatgaaatggccaaaaaggcagctgagataaatgaaggagaattgattcatctgcaagaaaattacagaactgctccgcaaattgttgaactcgttaatgaattgtttgcccatgtgatggcaccaggaggggaggacgcccttccgtatgcgaccagttatgtgcccctaaaagcagggaggaagcctcatacaaacaaacaagcacttgctgctttccatcaacttgaaaaaagcaacgaagctcgctcgtttgcatcgctgctgcaacaaacaatagcggatggaatgattgaagtggaaggtgaaggcaaggttcgccaagctcaatggaatgatgtcgctgttctacttccttcgcgtacaaatttgccagagcttgagcaggcgtttgccgaagctggcattccttatcgtgtgcacggtggtgtgggtttttttgagaaacaggaagtgattgattttttaaatgtgcttaattggctcagacgtccattcgaggatgcttatgtggtggcgttgcttcgttcccccctctttgggctgacactaagtgatttgctgacagtgaacgattgtaaagaggaacatgaaaacttagccgtttttttagcgaaagaagaagcgccttccttatttgcaaaccacccacggctgcaacaagcgctaaagcagtatggcgaatggatcgatttgttcttgccgtttgcttttacaggaagtgtaaaagaagggctgcttcagctgtttgagctaactggcctgcgttatgctgttttaagcgatacgaacggcattcagcgtgtcggcaatgtggaaaagctcattgatttgtttgcacaattaaatacaactaatctagaaacgctatgtttgcaaatgaaccgctatatagcggcaagcaaaaatgtccctgaagcagaagtggaacagttggagggagaggccgtaacaattatgaccgttcacgcctcaaaaggattggagtttccagttgtttgccttccgtatatggaccaaaaacgacggccggacacggatgcggtctattttgaccaagagtgggacattgttttccaactaaaattagacgatcgtgatcccatttctacgcctgcctatttccaggcgcaagaaaaaagaggcaaacaagcgctcgaagaggcaaagcgtttattttatgtcgctcttactcgtgccaaagattattgcttgttagcagccgcagacttgtccgaacgccggtcgtgggcagaaatggttgaagcagcgaatgagcaatctccattgtctgcgattaactgggttgaatctgtaaagagtggcgaaaacgtactcaacatttaaagatggaaagccgataaagaatacgaggagagtccctcctcgtattcttttttatcgaggtgggcaaggtgactcaatacgattacataggtatgtttttagaagaggcagatgagcatttgcaagcaatgaatgcaaagttgcttcaacttgagcaggatccttttgataaagacgcgattgctgaaatctttcgttcagcccatacgcttaaaggaatgtcggcgacgatgggcttcaatgccatggccgagttgacccattcattagaaaatcttcttgatgccatgagggacggaaacattgaagctggcgcaggcgaaatcgatttgctgtttgatgcagttgaatatcttgaagcaagcgtcagccatgtacggaataccgggggagagttagaagaagctaacgggttgcgggatacgtttgcacagcttctcggccaagaacgaaagagtgccaatgaggttgccgctagtctcgacacagacacacacgccgttatggatcaagctgtacaagacggtgtccctgtccaagtgatccatgtcgaaatcgatgacaatgcagcgctcaaaggagtgcgcgcttttatggttgcaagtgaagccgcacagtttggcgaattgattcatacggaacctagcagagaggagcttgaggaagggaagtttgccagcggctttacgctcacggcagctacgacgcttccagattcagacattaaaaaacgcctagaaggcatctctgaagtgaaacaagtaacagttaccgcttataagccgcagaagaaggcggataaggccaagtcgcaaacggcaaaagccccttctgaaaaaggggccggtgcaaaaggggagcaagcgcagcagaaaacgattcgtgtcaatgtcgaaaagctggattcgttaatgtacttgtttgaagaactagttgtggaaaagggccgtctagagctagtggccaattcattgcaaacagatgagctgacaaatgtatttgaaaaagtaagccgcattacgagccatttgcaggaagtaatgttgtctgtgcgactgatgccattagagccagtcttcagccgttttccacggatggtacgtaaagtctcaaaagaaatcggcaagcaaatccgttttgtaattgaaggggaaacgaccgaattagaccgggccattattgacgaaatcggtgatccgctcctccatttgctgcgcaattcgattgatcatggcattgaagagccggcagtccgccaaaaaagcggaaagaatcctgaggggttaatcgtgttgcgcgctttttatagcggcagccatgttgtcattgaaattgaggatgatggcgcaggaattaaacaagaaaaagtcttgaaaaaagcgattgaaaatgaattgattacggctgcagaggcggaaaaaatggcaagtgatgaaatcaacaacctgctgtttgcccctggttttagcacagccaatgaagtgacggatttgtctgggcgtggagtcggccttgacgttgtcaaaagcacgttttctgctatgggcggtgaaatcgctgtttcttccaaagagggagagggcacgcgcttttccatttcgctcccattaactgtttccattatcgatgcgatgatggttgaacttggctcagacatttatgcctttccaatcgcgaatattgccgaaaccgcctatgtgcaaaaaagcgagttgaagcaagcagatgggcaaagcttgtttgaatggcgagggcaacttgttccccttgtctcattaaatgagcagtttggcttgccagaaaaggaagacgagcaagagcttgccgttcttatgctttaccgcaaccaaacattaatggctgtaaaagttgatcgctttattggcaaacaagaagttgtgctaaagccactaggttcattgctgaaagggacaaaaggaatctcaggcggaacgattcttggggatggcacgattgcattgattgtcgacattgcgctgttttttaacaattaatcgcttcaactatgaatgaaaaaagccttgctttagagaaaggggggaaacgatcgtggaacatacgaaacaatttaccgtatttgccgtaggagaggaatggtatggcattgatattttgcacctttcttcaatagagctccttgacggcattcgtattgtcccaaatgcggaccctgccataatgggggtcgttaatattcgcggctccctgctgccggtagttgatctacgttatttgctatatcgaaaaaaaatggaagtgaccgaagcgtgccgcttgcttgtgtgtgcggaaacacttggatcatttgtcctggccgtcaatgaagcgagcgacatttgggaaatcgatcttgcttcgattgaagagctgtctgatgccccttataaaaaggggataagccacgtggaggggacgcttgtaaccattctcgatggggcccagttggcaaaagagattgaacatcaagtccagaaacaataaactacttgctagttaggcatatatggatacgaagagggcaattaaaccgatgtttaactgccctccttgcaatgtttaaaaatgggccagcgttttacagcgctcagcgtctttctgctgatgtgtgctaatcagtcgcttggcaacgtggatgtcatgccacatcatatacgtaaggactgtccataaacggcggctataatcgccgtggccgtcccggtgtgcttgcagcatttgcagcaaaaaaggcttatgaaacacgtcttctgtattgcttgactcgataagctgcttagcccaatcgtacagttcgtttttgagccatacgcgaatcggcactggaaaacctaattttttacggggcacaatatttgccggaataaggtccttcatggcttgccggagcacaaatttagttgtcttatgggaaagtttcatatcctggccaagcattctcgcaaatgcaaatacatttttatcgagaaaagggactcttaattcaatcgaatgtgccattgtcattcggtcagccttcacaaggatgtcgccaggaagccacgtatgcatatcgacaaattgcataattgtcgattcatccatgccttttgcctgttcgtacagtggcgctgttacattggtgtaaggtttggttcgatcatagtcgcggaacaactgtgttttttctttttcagaaaaaataaaggcattgccaatgtaccgctcgttgaggggagtcgttccccgtataatgtagtttcgtcccttcagcttagacggcatatgggcaacaacccgctttaagccagcgtgaaacgtaggcggcaactttttgaaccaggcaaggtcaagaggttcccggtaaatgttgtaccctccgaacaattcgtcagcgccttctcctgacaaaaccacctttacatgtttgcttgcttcttgggcgacgaaataaaggggaactgctgctgggtctgcaacaggctcgtccatatgccacacgatgttaggcagttcttgaataaattcatcagcagatatgactttatgaatatttttgacgcctaatgcttttgctgtttcttttgcgacggcaatttcgctatagccctctgtctcgaaaccaaccgtaaaagtcaataggttagggtgcacttgttgtgctaaggcagcaatcgaagtcgaatcaatgccgcttgataaaaatgccccaactgggacatcagagcgcatatgtttttcgacagagtctgttaacaattttcgtgtttggttggcaagctctgtgaccgtcggccccgatctaggctgaaaagtccgttcagcatatgcttcaatttgcacacaaaagtctgcattgaccgttaatgtatgtcctggcagtagcttatgaatgcctttagtcagcgtgttaggttcgggaacaaactgaaaggtggcgtaatgttggagcgcttcttgctcaatcgagatttgctcaagcaatggcatgattgatttttgttcagaggcaaagaaaaaacgttcgtctgttttcagatagtaaaacggcttaatgccaaaacggtcacgcgcacaaaacaattcctttttgtgcttgtcccaaatcgcaaacgcatacattccccgtaattgtttaaccgcatttttgccatctgctgcataaagagcgaggagtacttcggtatcagaatcggttcgaaatgtgtaaccgcgttgaattaattgagaacgcagctcgatgtaattatatatttcgccattaaaaacaatatggtaacgccctttgctatatgcaaggggctggtcgccgtgctctaaatcaataatgcttaaacgtttaaatccaaaacggactgtttcatctttataagtaccggtgctgtcagggccacggtgatgaattgcttctagcgtttgaatccacaaatgatcaggcaaatggctgccatttcgaataagcagatcgccgacaaaaccacacataatgtttcctccagttttttggtgaactaatcttactccaattaaatataaaagtcaattttttgctaaaagggtaacagtcgactaataacgtaggacaatgtttcattttcatggtttagggtataaacacataaacccaattttgaagcaggagggggattcttatggaaaagccatttaggctagacggcgacgtgtacaggcaattaagcattattaaccgtttggaattgcgggccgatttaactgtccaatccctttatgcgaaagcggtgttggaatattccttgtaccactttagagaacaacatttaaaagaacaaattgatcaggcgttggagcaacgtgacgaacaggcattttattcactaacagaagcattaaacgaccacagggaccgctataaaggcgggcgtacactgcatgaaaatggcttcaggctccatctgacgttccagtagcgaaagacggagcaggtgcgggaacggctctagtacaggcaagcgagactgcggtgaactgcttattcccttgtgaaaagcccattttctaatgagaccgttgtacattagctaaaaaagaatgaaaaggcttcaggtcagtctgagcgaggttgccaactatttcggcaacctcaagcaggtaggccgtttttttatgccttttataaaaaaaattgtcgaacaaatgcagagaattgtcgaacaaaatagattgttagattctatcccttttagtatcataaatttgtcataataatatgttaaattatgacataataaggaaaatgaaagaagggatgaggatgaaacaatcaatacaaaagtctgtttccttgcttctcgtgtttttgcttgtgtttagcagcatgccgttgcaagccattgctgaacaaagcaagcagccttctgaggcaggggaagcggaaattggagaccctcatgaagaggcgggagaagaggaaactgatgaagaagacgaagagacacctcttctttatgagaacatcgagcctgattttctagcaggcgaacattcagtttatgaagattctgaatgggaggaagaggatgaccctgcacccctagaggaagtaacagaagagcggacggaaaatacaaaacttttcataaacgacgatggcacgtatacgcaagaagtgtatttcgagccgatccatacgcttgatgaacagtcaggggaatggcaagacatttcaagcgatttggaacaggggtcgtcgggagaaattgccactgaaaatacagacctcacctccaacttcaagtcaacaatggaagacggagaatatgcgtcttatacccggcatggtcatacacttacattttcgctgctaaccgcagaagatgaaaacggtgaacaaattgtggccagagatcaacaggctgtttttggcgaaaatgagattacctactccaatgtttttcctgatattgatttacgccattttacctttaaccaaagtacaaaagaagatcttgtcttacaaacgtacaatggagttcatattttcaactataagattgagactgaattagatgctcaagaaaacgaagatggttcgatcacgtttagtgacgaaaacggagaagcagcttttgagctgcctaaaccatttatggctgactccaattatgacgatgccaaaggagaaacagcagaatcagacgccgtgtcctacaaactggaagcgattgatggcggttacgagctgacgattgacgcagacaaagactggctcgcagacgaggaacgcgtgtacccggtttatattgacccaacaacttctgtcaatgtgagcgctgatgcgtttgtaatgagcgcttatccgacgaccaattatagctccgccagcagcaagtgggattcatcgcagaatgcccatgtattgaaagtcggcaaatacgatagcacaacagggacgacctatggttttttaaaacaaagcatcgatccagtcaaacatatgacggtgacgaaagcaacattgaatgtccatgttattcaccactactatggcgataaccccaatgggctatggcttgatacagtgaacagcgattggcagccaggatcacttaactggaacaataaaccgggatcgaccaatattggcaaagtcgatgtcggccgtaataaaccggctagctttgatgtgacaagcacagtcaaagcatggctagatggctcgaaaaagaactttggctttaaattgcatacaaacggaaatggcaaagagtattggaaaaaagtgatttcgaccacaaatacatcaaagaaaccatacttgagcatcacttatacgattccagcgccagctgcccctacgtcgaaaacatatacaaacggcgatggcaccggccatgttaacttaagttggaaaaaaatgcctggggcaacgggctataaagtgtgggtatataacggtaaggactatcaaggatttgacgttggcaatgtgacaagctggtcgacggaagggaaaaagctttggccgacggcaagcgatattgctgctgggaaatttaagctatacacaaatggcaaaggagcggagttggccgttgacccctctcccgtttacaaaaactcaggcggcaattttccaaacagcaaaaattactggttccgtgtcagcgccgtatacggacaaggcgagagcgcgatgtcggctgagcataagccaaccattccaaatttgaaaaaaccggacaggccaacggctaaaagctacagtaacggtaacggcactggctacattgatttaaattggccagcggtcagcggtgccagcggctacaagctatatatgtataacggcaaaaattatgaaagtattgacgtcggcaatgtgacttcctacactacgaaaggaaagaaagtgtggccgacggcagcggaaatcaaagctggcaaattcaacttgcatctatcagacaacgcaggagcagaattgccgatcgacccatcgcctgtttataaaaattctggcgggaactatccaaacgccaaagattttaattttaaaatccaagcatacaacaagcatggcgaaacagtacggtctgccagcgcgcttccttatattcccgacctggctaaaccaaaagcgccaaacggcgttgcttacacgaacatgaagtcagaaaacactggttacatcatgctcgattgggaagaaattgagaacgcatctggctataaagtgtggatttccaatggaaagacgtacaccagttttgatgttggcgatacaacgcactggacgacgcaaggaaaagggatttggccaacggcggcggatattgccgcgggaaaatcggcgctttatacgaacggcaaagggaatgaattggctgttgacccatcgcctgtttacaaaaatgccggcggcaatgccagcgcgaaaacgtattttattcgactgacggcttataacaaggacggcgaaacgatccaatcgccagactttaaaccgtcgattagccaaccaactgaacttttcggcgaggaagactactggtcgattttgacagtcccttatggcaaagtcaatgcagcgacgggcaatttaattgtctcagaagacgatttgtcgattgacgggcgcggccctggacttggcttcacccgcacttacaatagcttggcgccaacgagcggcatgtttggctatggctggcatgcagacagcgaaatgacgttaaagcaatcgggcaaccaagcgctgtttgtcgatgacgacggtacgctccatgtctttacgaaacaaggagacggcacgtacaagccgcctacaggcgtgtatttagagttagaagagacaagcgacgccctgattttaacgacaaaagagcaaacgaaagcgcatttttccaagacgacaggcaagctcgtaaagctggtcgacggtcataacaatgaaacaacgtatacgtacgaggaaaaccgcttaaaagcgatagaggatgcgtcaggccggcaagtgagctttgactacaatgccgatggaacggtaaaaacggcccatgcgcctggttcccgtaagcttgtttaccgctatgacaaaggccgccttgtcagctatagtgacttcgacggcgccgtcactacgtatgaatacgatgaaagcggaaagcttacagccgtctatgagccaacgcacacagacgaaaaaccagtcgtcaaccgctttctttacaacggcgacatgctaaaagaagcaatcaacccacgcaatgaagcatatacactttcgtatgacttgcaaaagcggcaattgttgttcacgcagccgaacaatcgcaaattatcgtatacgtataatgcagcgggcaatccgatccgctatgtcgaagatgtcgatggccttaaactgacaaccgaattcaagtacgaaggcaataacttgacggaaacgacggacccgaatgacgtcggcagcggcaagccaaccgagtcgttccagtacgacaaagacggcaatattgtgaaagcagtggacgattacgggacagagacgtatacctataacgataaccatgatgtcatttccatggtggacacagaaggcgacgaagtcacgatcgcttatgatgggcttgacccggtatcggaaaccgaccaaagcggcaaaacggcatcggcatcgaaatatgccaaaaatggaaacttgaccgaagaaagctatgaattggccactgccgcaaatgtgctggccaatgggcaatttgaaaatggcacaacaagttggacgcggatcgacaaaggtgcgaatggtgcattcggaacggataaacaatcaccaggtaaactagccgggcctcattcgttgaaaatgacgcttcagtcccaatcaacaggcactgtttatcaagcggcgacacaagtggtcgaggcccttccaaatgtgtcgtacacatttagctcgctcattaaaaccgatacaagcggtgcccgggcatttctcaatgtcgaaatcctcgattccactggcaagcgaatcaagtgggtagacaaccgctacagccatttatcgggaaaacaagagtgggtggagcgtcagctgacctttacaacgccagccaatacggcgaaaattcgtgtctacttggagctggaaagcacgaagcctgatggaacagggactgcttggtttgaccaggcccagcttgagcgggctgaagtctcgtcaagctttaacccgatcgccaattccagctttttaaacggagcgacagggtggagcggctctggcggcacgattgacaacgatggctttgacgatggaaaatccttgaagatcacgaaaacggcaagccaaggggcaagcgaatacaaacaaacggtgacgctcaaccaagcagccagcgaagcgccaatcgatgttacccttaccggtttatcaaaagccgataacgttaagtcaagcaactatggcctaaaagcgaaagtgtattacacggacggatcgacagccgactttggcccagccacattcccagaaggcacgcaggattggaaccgggcgaatctgaagatcacgaaaagcaaaccgattacgaaaatcgatgtgtcattctttttccaaggcagtggcaccgcttggtttgatgacatccgtctgctggaagggtcggtcgtcaaaaagcaaacgtacgacgataaaggcaactacgttaccaaagtcgaagacgagctaggctatgtaacgacaagcgtttatgacgattacggcaatgagatcgaatcaaccgatgcccttgggaaaaagaagtactacacgtatgatcttgccaaccagctgaagcagctaaaactagacaacggcacgacgatttcgtatacgtacgataaaaacggcaacatgctgtcaaaatcgattgctcccccttctggccaagcgcaaacattcacgtatgaatacgacgctgccggaaaattgatgaaaacggttggcccgttaggcgatgtcgtttccaaccaatacgatgccaacagcaatctcaccaaaacgacgacagcaaacggccatacaacagaaatgacgtatgacggcaccgaccggatggcgacgaaaagctataatggcgagctcgcataccgctttacgtatgacaaaaacggcaacgagctgacggtgaaagacgtaaaagcagggcaaacaaaaacacggacattcgacaaaaaagaccggatggttacgctcactgaccgtggcggcaagcaagaatggacctactcggatacgtccgacaagctcaaccaatttacgttgacgcacggctcattcacacaaacaaacacatacgaatacaacaaaaaagacgaaaatatccgtatgaaagacggcgacgccacgtaccattttgattacgatgaaaaaggaaacatcaaaacgtacacgtccggcaacggcacaggcgcctcctttacgtacgacccccgtggtcttgtcacaacgctgtccgtcggcacgacaaacggcccagcgctgcttgaagaattcatggcatatgacgccaatggcaaccggacagaaatcaaagaccgcacaggcaaagcaatcacatacacgtacgggccgctcgaccaactcacaagcgaaacgctccgtgacggcacgaaaaccgaatttgcctacgacggttttggcaaccgtatttccgtcaaaacgacaaaaaatgggcaaacaacggagacaaaggcaacgtacaacgtatataatcaacttacaagttacggcagcgaaacgctgacatacgacgaaagcggcaaccgcctcacagacggcgcttacacgtatacatgggacgcggcagaccaaatcacagcgattacgaaaacaggtgaaaacaaaccgtttgtcacctaccgctacgacgaagacggccgccgcatcgaaaaaacggtcggcaccactgtcaccaactaccattacgacggcgacagcttaaacgtcctctacgaaacaaacggcaccggagcagtcacaaaatcgtatacgtattccgagtccggccagctcgtggcgatgaaaaagggcaatgccaaatactattaccattacaacgcccacggcgatgtgattgccctcaccgacaaagacggcaagcgcctcgccacatacgaatacgacgcctggggcaacccgctgaacgtcgaagaagcagacgaagtcaaagacaacccgtaccgctacgccggctaccaatacgaccacgaaaccggcatgtactacttgatggcgcgttactacgaaccaaaacacggcgtgttcttatcgctagacccagatccaggcgatgacgacgacatcctcacgcaaaacggctacagctatgcgaacaacaacccggtgatgttggttgatccggatgggcattgggtgtgggccgctgtaggcggagtgattggaggaatttcatcctataaagccgcgaaagcgaaaggggctaaagggtggaagttgtttggtgcaacggctggaggagcagcgttgggcgctattggtgggggaaagataaaagctattggtaagtttattggaaaaagcaagcttgggcagaaagtaccctacagaattacgagtcaatataagagaagtggtagtctcataagtgttgtaaaaagatcaggaaagaataaagggagaaaatttggattagactatcataaatttcgagaaaacaaaagagagtcaactcgaaaaattcttcatgtacactttggaaaagggaaaaaaatacaaaagcaccgtgtaatttacccaagacgaagtaaaataaaatggaagtgaaaaagagtaggttagagagaattctttctctgacctactcagttttgaaaggggattttaatgggtgataatgaaccagaagtatttgaattagagtcactagacagtgcaccaaaagaaaaggttgaaataatacatatgcagcacatgtattatttcagctttcataattgtggagaattaatggagctactagaacgacattgtgaggttgagatcctcgtatgtattgatttatctgttattatgaaggatgagtttataaggattgttgcagacaatcatgactaccatttttttaagcagcaaaaacgtcaattgcagtatgttcaagttcgattagagaaagaaatgattaaagaaagtgaatctttttttgaatttatagatgttcttgcaggaatgaatgatttcatttttattgtaattaatccgaaaggtgaattacctcattatttattgaatgataaagtgagagtagatacaagtaaggnnnnnnnnnnnnnnnnnnnnnnnnnnnnnnnnnnnnnnnnnnnnnnnnnnnnnnnnnnnnnnnnnnnnnnnnnnnnnnnnnnnnnnnnnnnnnnnnnnnngtagatacaagtaaggacgaaaaaatatatgtattcgattacgatggtgctggtgcttttattttctcttaattctttttacgaattttggtacatctaagagtaagtagaacatagcattcgcattaaaaagtttaagatagaagtagagactttaatgaagaagagattaaagcccgcacgaaagtgtgggcattttctaatgtactactttatccagacccaggcgatgacgacgacatcctcacgcaaaacggctacagctatgcgaacaacaacccggtgatgttggtggatccggatgggcattgggtgtggctagcggttaatgctggttttgctatatacgatggctataaagcgtacaaagccggaaagggctggaaaggggttgtctgggcagccgcatcgaacttcgggccagggaaagtgtttaagggcgcgaagaaggtactggggtttgcgaaaagatctagcaaaatcaaaggacatacaaagcatggaattcaccaatctataggaagaaatggtggaagaggagtaaacgccagagctaaactcgacgctgttagaaatgctaaaaaagtaattaagcaaagcaatggagcgacaaaatatgttggtaaaaaagcaactgtagttttggataaaagaggtagagtaataactgcctttggaagttctagagcaaaggggtctaaacaagtatttcataagcacggaaaaggaagccgggcgaaacgaagataaatttgttatgaaaggggagattgtatggctaggattaaagataaattaataaagttagaacttgttccaaggaaatattttgattttgaagaggacccatttatcctatcgtactttgaactttgtttaaataataaagttatattcagagatttttcggctttactacttaagagtgaatatgaactttttttaaatcaacttgagttaattttattaggaacacaaagcagcacttcctttgaaacgattgaacctttattaaatgttaatatacagcggattcaagatcagctgatagagaatattcaaatcgtagttgatgtatgcagagaaaatgaaaacgagaacgatggtcacgttataaacgttaatgaaactacattaagaaaattcatggatgaactgaaacaggagttgaaaatgacaaaaaaaccttcaaagttgccttaaataaagagtgatgcaccatattcctatagcttgaccccgcccacggcgatgtaatcgctctttgagaaaaatataatctgtgttgcgaaggataaggtacatgatgaaaaagcactttaaaggtctaacagaggaatctttagacaacttgtctaatgataaggaccatatcatacagtttagtaacaatagaacccctcttagatttactaacgagtagtgctattaatgaaatttgggtagctattgaatcagatgattatatgccggattggttattggaaacaatccaatcttatcaacacaagctattcaaagaaaacggaatagaagaagagttttttcaagtgaatttggagaataaacagatcaaaaataacgttaagtttttcgattttgtaaaggctattgtggaaataaatgattttggtttcattgtctttaacccgaaaaaagaattacctaattattttcgtaatggtaaagtgatggtcgacacaaaaaaatggtgagagctatatcatttttgattatgatgcttacggggtgtttatcctatgttaatgaaagaaattttttgtcgccaacgcattacgtaacaaggtttaaaaacagagaactaagcttgtttattattaatgttgaaaggattttggggcggctcctttttaccgtctgccctcatacttaggcgttggcaaagtagttcaatcagttagttgctttctttttgggtatatgtaatggtagaagaaagttgaggcgattttaacgaaaaggagcaattgtttgtggcgaaaaaaccgattcaatgtgaaaacgagtatggcctcctaaaggaagttgttgtctgcgaaccgacgtttatggcaattgaggaggcgattaatagaacgcaacggaaatacatggatgaaaatattaatagggacatagcgagccaacaacatcaagcgctcgttacagctatggagaaagaaggcattcgtgtttattccgtgccagcacacgaccatttgccggagcaagtgtttatgcgggacagtggttttgtcatcggaacgtccttgtatgtagccagtttggacagagagattcgcaaaggcgaggaaagggtgcttggcgagtatttgaccaaaatcggcaaaccgtttgcaaaagcaagtgcaggcacagtggaaggcggagacgtggtcctcgccaatgatgaagtgtacataggggcaagtggacgcacaaataaagaaggcattgaggagctgcgccgtctacatcctgaaaaaagaatcgaaatggtttcactagatccagactacttgcatttggattgtgtgtttcagcccgtttctgagacgcaggcgctcatttaccgtgaggccctttctaaaaaagcggtcgacatgcttgcacagcgtttttcgttaattgacgtgccaaaagaggaacagttccatttaggcgtgaatgtcctctcaattggaaacaagcgggtgattgcactgcccatgaatgaaaacaccaatgcccagttgcaagcgcacgggtttacgattattgaagtcgacttctccgaaattattaagtctggcggttcgttccgctgcgtgacgatgccgttagttcgctcgaattaacgtataaatctgcgtcttctggttatattacgacagaatgataggaggcgcgttttagcagatggagcgaaataaacggttagccgctgaacgagcaaggcttgcatctggcggtgggacaaaaaaacagcaagctcagaaacaagctggaaaacaaaccgcaagagaacggattggcatgttactagaccgtgagagctttactgagcatcttgcttttgccagcggatctgggggtgaggcaggcgatggcgtcattgtcggttatgggacaatctccggtcgccttgtatgtgtctatgcacaggatttcacggtcagcggcgggtcgcttggggcgatgcatgccaaaaaaatatgtgcgattatggacttggcctacgacatgcaagcaccgctcattgccctgatcgattcaggaggggccagaatccaagaaggggcaaaagcgcttgctggctacggagacatttttaagcgaaatgttcgctattcaggcgccatcccccagctttcagttatgctagggccatgtgcaggcggggccgtctactctccggcgttgactgatgcaatctttatggtcgaccaaatgagccaaatggtgattactggcccaaaggtgcttaaagcagcgacaggggcagaagtgaaaatggaagacttaggcggtgcccgcatgcattctgaaaaaagtggcgttgcccacttttgcgcaaaaacagaagcggagttattcgtgcttgttcgccagtttttaagttatctccctaataacggagcgaaaaagccatgccataagcgtgtgagtgagaaagtcagcgcccatttgccccgcgatagtaaaaccgtgtatgatatggtgccgattatttgcggacttgctgatgaaaattctttttttgaatggtcgaaacggtatgcccgcaacttgattaccgcctttattcgcctagatggccagcctgtaggtgttgtcgccaataatccgaagcatcttgcgggctgcattgacatggacgctagtgataagtgtgcccgttttgtccggttttgcgattgtttccacattcctttgctcgttcttgaagatgtcagtggctttattccaggtgtggagcaggagagccgcggattgattcgccatggcgctaaaatcatttatgcctttgccgaagcaaccgtgccaaaaatcactgtgattgtgcgaaaagcatatggtggcgcctatgtggctttaaatagcaaagctttaggggccgattttgtttatgcctggcctggagctgaaattgcagtaatgggcccagcaggggcggcggcggtccttcatcaaaaagacatccaggcgagcaatgacccggccaaagcgcttttacaatttgaagaaaactatagggaaaaggtcgctgatcccttttcggcggcaaaagaagcgctgattgacgatgtgattgagcctgacgagacgaggcaacgattaattgagtcattttcgattttagcgtgcaaagatgaacgtgctaattggcaaaaaaagcatggcaacatgccgttataattgatgctttttcactcgctcagtatgtgatacgatacgatagaagcgttatttattgtatgaaagcgagtcgttgccaatggttgtcctttctgaaggctgggtccagtttttattggctatcagttgcgttctgctgctcgttattagcttgttggccgttttttcttggttgaagcgaaagaaaggcataacaaaggcgaaagaacaagcaggcgcttttttagtatttgtcacagtgctgttaatttattttgcattgtcgcttgccctcccccgcgcgtatgtttctgatgtactcattgggccaaagacagcaaaacaggtcgaagacaatggagttcggtacttgagtttatcaacgatttacaaagttcacggaattgaaacaggagcagtgatccgagaagcacaggggaagaccgtacatattttgataaacgaatatgagccaatttatgcatttgccaaagcgaacgaggaagttgtccgaaatgaccagtcaattgacgtagcggcttatatcgatcaagtcgccgtccctgagcttgaaaagctagacaacgaggagattacgttaacacagttgcgggaacgtctccctcatctccaatttgatttccaataaatgcgttctgcttgctttgcgagcaaactggccagtaaactagtagaggaggtggcgcaatatggcccgtagtgaagacggtatcgttcaattgtcaacagaagaaatgaagtcctttttgatcaataaagcggacgagcccattattattgacgtccgcgaagtagaggaatacgagaatggccacctgccaggtgtaccactcattcccatgaatgaaatccctagtatggttgctggaatggaccaatcaaaaagttatgtatttgtgtgccgtagtggcagaagaagccaaaacactgctttgtatttaagagaacagggattttcgaacgtccgaaattatgaaggcggaatgttagcttgggatggagagcttgaatatggccaggaatgggtcgtaaaggacgtagaagaactttacaaataaggtgcgaaaaaggcctctcctgcacgacaagaggcctttttaggtttatctctcctcttttagggaagacataagagtaagaagatcattctatataaaaggggatggaagacatgaaagccaaacaaacgacacttgcgcttggaattgcggccgctgctggaatggctgttgtttgcttaaaagacggaaaccgcaggcagcaaatgaaaaacaaaatgcaagcgatgttagccaaatggaagggacaaaaaacgatggcgaatgaaaatgtgtttaagctcggcaaccctaagccatcgtcagcagacagcaaaatggtcgatgaaggttccttgtatagcattaagcgctacaacgaaaaataccaagaaggcgtttaagtgcagtcggcaccgacttagaacggagctcattatcctgtgctgacaaaacgtgttcgttgagccatggacgttgttgccatcgcctagacggataaaaagcgcttgtcgggcgaggaagatgcaagtcgaatgggtgttcatgagcagtggttttcctgcttaaacgacactttgtttacagtctgaagctgcctaaaagggcagcttcttttaccaagggaggaagggaaccaatgtttttaattgaagaacgggagatcggctctgtaccgctattacatattacaagcaataacggccctgcgaaaaagccagcgcttcttttctatcatggaatcacaagtgcaaaagagcataacttacatattgcctatacgtttgcaaagaaagggtttcgcgttcttttgcctgatgcccttcaccatggtgagcgggaaaaaagcgtcgttggggagaaacgctatttatccttttgggatattgttttgcaatcgattcacgaagtccctactatcgccgagccttttttgcaagaaggattgatcgatgagaaccggatagcgattggtggcacgtccatgggggcgattactgcttacggcgcattggcagcttatccatggctttgttcaggttgttgtttcatgggcgccccccaatatatgacattttcgaaagcgatgtttgaaaagctggaacaacacggagtggaagtgaaagaagcgcagaaagaagctgtgctagcaaagatccgcccgtttgacttgacggctgacatcgaacgattaaatgggcgtcctttgtttatctggcatggaaagcaagatgacacagtgccttttatgtatgcggaacaatttgccaatcggttgttcaatgcttatcaaggcaaaacagaccgctttcagtttattgcagaggaaggcgccggccataaaatttctagaaaggcaatgcttgcggccgcagagtttctcccgcaagcaatagggagttctcatgtttctcgtacaacataatctttttagggaagctggaaaaattttcattgttcttgtcggttcattgctgcttgcttgttcgttaaacttatttttaattcccgctgacgtgtttgccagcggttttacgggcgtagcccagcttctttcttatattcttcctttatcaacagggacgttgctcttgcttttaaacattccagttgccattttaggttggcttaaagttggaaaaagctttacagtgtacagttttgctagtgttgccatgacgacgctttttcttgagctgattcctgtccatgctttatcgtcggatattatgcttaatgcggtctttgggggcgtgatcggcgcaacaggcgcaggcttgcttcttaaatggggcgcttcatctggcgggctagacatcattgcccttgtgctggcccggtatacggatcgaccagtcggcagctttttcttcctcctcaattccattattgtcgttgcttccgggctattgcttgatcctgaaaaagcgttatttacattaatatccatatacgtcacttctcgctttattgatgcgattcatacacgttacgtgaagctgacagccatggttgtcaccaaaaagcctgatttattaaataaggcgattcatgaacggctgacgaggggaattacccgaattcctgcaaaaggcgggtacacgtttgaggaaaaggaaatgcttgtcattgtcatcactcgctatgaattgtatgatttaaagaacatcatcgaagaagtcgatccggaagcctttacgaatattgtcgagacagccagtatctttggcttgttccgcaaagattagggaggatttttgatgaaaaagtggaatgtgcttatagcgcttagtttcgtattggtgctctgcgcatgcggcggacagccagaagaagaaaatccggaaattccggcgggaggagatgcctcagtgagcactgactggacgtttgacgttcgtgcaaagcaatcaggcgagatgttggaagttgaaatggatgtcataaaccaatcggatgagcagcaaacacttgtctttccatcgtcacaagaatacgagcttgtgcttaagaatgaggaaggggaagaggttttccgttattcagaaaaccatatgtttgcccaagtcatcgttgagcgtcaatttgaaccaggagaacaaattgagttgcaaaaggaacggattccagttggcgatttaccatctggccattatacattaacagctgagttagctgtatcaaaagaaacaattgaagcgcaaggagacgataatccgtttgtacaaacagtagaagtggaaatcgaataagcgcactagacgcctaaaggggtagcttttgctacccctttaggcgtttttcactttctgctttcaaggcttctatgaatgtttgccattccggtctcccttgttcagcaggtagcgaatcgatgtagttttcattctgaatttgtgttttttcggtgttccaaaaatgctcaaacggtggtttcattcgctgctcctttctgtatggctgagttgaataagggaaagcaattcatcatcatttaattctgttaaaaacgcaggcgtttgcagaaccccctcagcaagcgcttttttcccattgatgagctgatcaattcgttcttcgacagtgccagccgtcagcagtttgtatacttggacaggctttgtctgaccgatccggtaagcacggtctgttgcttggttttcaacagctgggttccaccaccggtcgtagtgaatcacgtttgttgcttttgttaagtttaagccgacgcctcctgctttcaacgacaagacaaatgcggctgcatgggggtcgtgttgaaattggtcaatggccatacgccgttggctacgggagaggccaccgtgtaaaaagggcacaggcaccccatagcgagcttgcaattcgtggctaatcaacttgcccatctctttatactgcgtaaaaatcaagacactctcgccttttgagaaaatgctagcgacaatgtcgaggaaagcatcccatttccctgattgatgccccgctatatccccgtctttataaaattgagcaggatggttgcaaatttgtttcatgcgcgtaatggcgcgcaagatcattgctttccgttccaaatgagcgactgtggcgaggcgttctgacacatcttccactactgcttggtaaagggcagcttgttccagggaaagggggacagactcggtcgtttcccgcttgtttggcagttgtagtccagtagcagggtcatttttcgtacggcgcaacaaaaacgggcgtattaacgtttgcaacgcttgttgtttcgtttcatcatggtctcgctcaatcgggcgtatataggctttgtgaaagccggcaaatgagccgagcaatgatggattgagcaagtccatcaatgaccacaattcttgaagccggttttcaattggcgttcctgttaaagcaatgcggtgtgtagctgacagttggcggatcgcttgccgctgttttgtgtttttgttttttatatgttgagcttcatccaaaatcaggccattccagtggacacttttgaaaaagcgagcatcccttaacgcgagagcatatgaagttagaacgagatctgcttcggccagcctcgcgtctccttcttcgaggcgatcttggccgtgatggataaacacctttaagctcggcgcaaatcttttacattcatcggcccagttgtaaagcagcgaagttgggcagatgaggaggaatggcgttgtttgttgctctgtttgctgttcttggacatataacatataggcgattgtttgaattgacttgcctaagcccatatcgtcagctaaacagccgccaaagccaactttgcgcaaatggaaaagccagtcaagcccttgtttttggtaaggcctcaacgtgccttttaaggcggaaggcattgtaaccggctcaggctgctgtttatagagcgcggtcagcctctcttccagctcgtctgtccattctagctggaatggaacagtggaaagagcttcggggacatcttgtgttttcgtgattttccaagcatctaaataagtaaaacggctattgatatcttcgagataggctttaagttgtttcgctaacgttggatcccaagctagccactggccgtttacataaagaaatggtttgttttcttgtacatattgatcaaacgtttcctctgtaactgcttgcccaccaatggagactgtgtattggaagttcgctaaatcttgccagtttaaaacggggtctgccccattttgtgcggtttggtgatcgccaattaggcgaacgcttaatggacttcgctctttaagccattttggcacaatcaattgaatgcccatttcagcgagttgcctgtcgtaagtggtaaacagctgatacgcctcttcagcactcatcgtctttgtaggagctccaagcgacaggcctgctaatagcggaatgtgattcgatataagcaatacatcgctttttaaccgtgagacagggtttgtccgccaaggatgactgccagccatcagctgttccatgcctactaatgtttctggacggttacgatcagctacagataaagagacagaccagctttcctttggagacggcggatcgtgtaaaacaagagctgtttgaaacggctccgccttttttaggcccagctgttctgcaaacaatgtgcttggcggtgaaactgtcttcgagcgtcctgtttccaatgaatgcaaaaaaggcaccatttcctgcggcacggcttgtttccaagcagtgaaggcagcagagacgttgtcagcagaaaggagggagcgtacggcctcatcaataagcgttttcagcaatgtagttgcatggtgctcgatttcgtcgctttgcctatcactgttggccatttgacttgagcgcaaagagagagctgctttaggcagactggcaaaacagtcttcaaaccaagcatcattgattgttaatttccataacccgtcttgccctggcacgacaaggcctgctcgtataaatccataaatgctttctacaatggcaagccatgctgaaaagtccgcccctaagtgaagcggttctttctgtttccatgtctgaaaaacagggaaataagcgataaattgttttatggataacgtgattccttcaactggaaatgggaaggcgtcccacccttcattcgcttggtaaatcgttgcctcccccgcaggtgactgaaacaggcgattgtggagtggggcgtctagtaaagcacgatctgtctcaataaatgtgccgtaaaaggaatcagggtcttcttgaaaaagaagcagtttcaattcaaatggtggaaccaaaaaaggataaataaacccattttgtccagttccttttccttgcggttgttcgccccatagaaaaaaacgactgtcaatccagccaccatggatccaaatgctactgcttttcaagatgattcaactcctcaatgaatgccctgtacgttttgtacacttttttcaatttcccgatatactccctgtaacgcacatgttggccaagcacccgatacaattcttttaagccaatgacatattcagctgctgccacataatgttttctagaccgtttttccaccagcctgacgacaaattggtgataaacaggaagagccagttccggacggttcgttgcaagcgcctcaaggagctcgatttttggcggttgcaatgacaatgggtttttttcatacaacaaaaaataatcccgcgcttgatcaaaatagcggtaacggtttaaaagctgtacgtaaacgattcgcgtggcctcgttataaagtcgttcttccagcttaggcaataggtacgcaaggacagatgatacttgctcttgtcccattgcggctacaagctgttcaaaccgtgtaaacatcggagcctggagccagcggtcccacgttccgtaatgaacagaagtggctggctgcaaagcagtttcagactcatccgcataccgctgaagcgaaccaaggtggcttttctgatccgggaataattggcttagccaatgctgaatttgccgatggcgcccccgtttggccaggagcataaagtggtcctctacatcgtaagtagcgaggttgtttgtcgccactaaaaactgcaatgcttgcaattccttgccaataaacaaataaaaatagctggccgctaagcgaacttgttttgccgcaccgtcaaaggacgcttttgcaaaggactgctcaatcgcttcaagagaagccgcagaaaaaacaggcaagctggcttgcaacagttttggccatggggactgatcgtctttcaagctagctttaagttgtttgacgatctctttcccatatagacgttcttctttggtggcgctaagttgtttcaagtaggtgagcaaataactatgaatggattcgaaaaagtgctctaagcgccgttcgcacgcttcccagcgcccttctgtctgcgcctcggcatagattgtcttgataaacaacatatagccgcgccaatggggttcaacagtggcttcgacgcttcgctttgcttcaagggcaagcacttctaaatgggcaggtgaaaaataccttgaagaaacaagcttccggtatgttgctgaaagcgtagggccaagttgcatagcaagtgaatctcgaagatgttgattcacgctgtcacctcattcacaaaaacagtatccctttattttacttcttttggcggagaaaaaaaagtggtgctgcaaatgagcgagggtagaggcacgaaaaggcttgtccacgttcaattttgcccccgtaaaaaagcaagcacgttggttggtgcttgcaaaaagcggctacttgtttaagagctgctcaatttgcgttcggcggtttacaagtttttttaaccgctgtttgtgggtggaaatacggggggcatcttttgcttctatcgcttcaaacaactccattaacacatagtcgatttccaagtttagcatattataaagcgtacgcgggccgagcgctttgccatcatctttgtattgaaccatcgaaccgtttttattcatcatgattttctcactcccgtcaatttcaatcatggattcaacatccccgccattataagacgtaatatagagtggtcctttgctggttcgtttgacaatcccatttcctttttctgattgcaataggttttccaaggcatctgaaagcacatcgtcatacacatacaacacttttgcttgcatcgttaaaaattcctcattgcggatgaagggaagttcgtgtgtcaattccccaagctctactgtcaaataaatcgttttggcgtcataacgccagaaaagtgcatagtgctggcccatcatgcgtttaataaattgatggagggccgttttggacagattgattgaaagttcttgaaattcaattggcgtaaaggaatcacgcatgattcaagcactcctttttcgacctcagggcatcttttcgagattgctttatcctatgtaaaaaagcgaaaaaaaagaagcaaaacgcccaggttcgaaaaaaataggcgttttgctccgctttagaagcgaaagctgtaccgcttcgatacaacgtcgtaaaagccgagagagttgtataatgcttttgtcgcttcattattcatgccagtttctaattcaatgcctttgattttgtgttgctccgcccaataaataatgcgcagcaatagttttttagcaataccttggttccggtacgcttcttcgacatacaattcattcagccaaatgtactttccgcctttttgaaagcttgtcaacgtgttaaaaaaggcaaatgccactgctttcccttctagtcttgcgataaaaaaatagacgtgtgagtcagggtgcaacgcttcctccaaaattttttcgatttgtgacaatgcttttttaccggcaatcgcatggagctgtttttcaaacaggctagtcaactcccgcttcgttgtctctgtagttgtgtctgaagttaattccaaaatttcaatcatgcctcatcccctcccggcaacaagtttataaatggagcaccttttccaaatagcaggcgatgccgtccttttcatttgtctcagtcacgcagtcagcaaccgctttaatttcgtcgatggcattgcccattgcaacgccgtggccagcatattcaatcatttcatagtcattctcttcgtcgccaaaggcaatgatgtttccttgctcaattccgtaatcgttggcgattctttcgagagcggttgctttcgtcacattgcgtggggcaatttctaaaatacgcgtttcgcctttccaccagcgttgcagtgttgtttccgttcccgtctgttgtaaggtgtcgtgaaggacattgactttttcgggttttggttcaataagaatagcagttggtgcttcttttacgagtgcatgtagttctcctgtcccagcaggttcaacgccgtcagtcagaaactctgcaaaaaagccagcttgttttttcatataaaacgtgtcgccaatttccaccatcatattaaagacgccgatggtttcacatcgtttgattaactccttgctataagcaagtgggatcgattctagtatccttggataatgagcgtctaaggggtgatggaccgacgcgccattaaaattgatgatcggcgtcgttagctgtaattcttgataataacgtttgcttgcccgataagggcggccggtcgcaatggcgataacatgacccttttcttttgctttcataagcgctgtttttgtccgtggcgaaatctcttggtttttaaggagcaatgtgccgtctaaatcaagagcgattaaatgtcttttagccatattaagtcctttctacaaatggtcacaaaaagcgatcctcatcccagtgcagcagcccgtcacgtatgctatagttatagaagcgaacaattgcgaaaggagaacgctttgtatggaaatgctgttgacggaacttggattccgcgctttatggacacctgagctgattattgctctcgtcggcgttgcttttatatatagctggtttttcaggaggacaaacgctggaccaaaacgaaagccactcttctttttcctcggattggcagcgctttacttaggatggggcagtcctctttatgtaacggggcatgtgatgatgacactgcatatgttacaaatggtatttgcttattttatcgctgtcccacttctgttgttaggcattccacaagcgtggtatgaggcggttcgctcaaaacttgcttttaagccgcttcggctggtttggaatccaatttgtgcactgcttttgtttaatggattgttttcattttaccacgttccagcaatgtttgatatgctcatgcagtcgccagtgttgcatagtttgtatgaatgggtattgcttttcactgcggccctgatgtggtggtttatcttatcgccgttgccaagctcgtacaagctccccgatttgcggaggattttttacatatttgcaaatggcttattgatcactcctgcttgtgcattaatcatttttgctccgtccgctatgtatgccacatacacagaccctcttgtgtgggcaaatgtaatggcttattgtttgcctggtggggccggaccagaactgatgttgtcggcatttggaagccctgaatccctttctatttttgaagcgcgaattgatcagcagcttgctggtgtgttaatgaaaattttccaagagatcgtttacggaatcgcaattggctatgtatttaagcagtggctgaaaaaagaaaaattgcaagacggcgaattgacaattagcgatgtgcctcattcataaaaacagctgttaagctgttttttctttttagtaaaataaaataaaaatacagttgaatttatttttattcaatcatataattaaacacatccataaaaaagaacggaactggctaaagggagtgggacaatggaagttggcattataggcgcgacaggttatagcggtcttgaattgattcgtctgttgaaaaaccatcctcaagtaacaaatattatgctatattcatcttcgcaaagtggggaaacgatcaaccgtctgtatcctcatttacaaaatgaacaatggaagccgttaaaagaaatcgacttaaacaagatttccgctgaaatcgatgtgatgtttttagcgactcctccaggtgtatccgcagagtggagtggtccgttgcttgaggccgggctgtctgtgattgatttaagtggcgatttgcgtttgaccgaccggggtgtttatgagaaatggtataagcgcccatctgcaaaggaagggcttatagagcaggccatttacggtttaagcgagtggaacaaatcaaccattaaaactgcgaaattgattgccaatcctggttgttttccaacggcggctcttttagcactcatcccgcttattcaagctggtgcaattgagcgtgattcgattgttatcgatgcaaagtcagggacgtcgggagccggaaaatcgcctacttcgatgacgcattttagtgaaacaaatgagaattttaaaatctatcaagtcgcatcgcataaacatacgccagagattgagcagcaattggcaaaatggggagcgcagccaccgctgtcttttcaacctcatctcgtcccaatggtaagggggattatggcgaccatttacgccaaggcggcaaaacccctcagcaatgagtggttaaccgactgctataacagtgcttatgaaaatgctccttttgtacgaataaaagaaaatggaacgtttccggcaacaaaacatgtttttggcagcaattattgcgatattggcttttgttatgacgagaggacgggacgtgtcattgttgcttctgtcattgataatctcatgaaaggagccgctggccaggcggttcaaaatttcaatctaatgcacggatttgacgaaacagcagggcttgaggccgtgccaatgtatccataatggggagtggcgagatgttaaccaaacagacaactgggcaagcatggaagcaaatcaaagggtcgattaccgatgtaaaagggttcacgacagcaggcgctcattgtgggctaaaaagaaaacgattagacattggcgcgattttctgtgacgtgccagccaatgctgctggtgtatttacgttaaaccaaattcaggcagctccgcttaaagttacgaaggaaagccttgctcatagcaacggcaaattgcaagcagtgcttgttaacagtggaaatgccaatgcatgtacaggggcgtcaggactcgtggatgcctatgaaatgcgggcactggcagcagcaaaatttgcggttccagaagagatggttgctgttacgtccacaggcgtgatcggggaaaaaatgccgatggaaaaagtgcgctctggaattgaggacctggtcctgtccaaggagtcgactccgtttgcagaagcaattttgacaacggatactggaacgaaagaagtatgtgtggaagtagtgattgatcaaaagacagtgcgaatcgccggcgtagccaagggatcaggcatgattcatccaaatatggcgacaatgcttggttttatcacaaccgatgcgaatattgagactgccgcattaaaacgggcgctagccaaggcaacggatgagacgttcaaccgtattactgtagacggggacacgtcaacaaatgacatggttcttgtgcttgcttctggtcttgccgataatcaacctttagatgaaacgcaccctgattgggcgaatttttatggcgctttgtctgcatgcgcagaaagtttggccaaaaaaattgccaaagacggagaaggggcgacgaaattaattgaagttcaagtagctggggctgttagtgatgaagaagcaggcaaagtcgctaaggcgattgttggatctgacctagtgaaaacggctgcttacggcaaagacggcaactggggccgaatcatttgtgctattggctatagcggctgcacgcttgacccggacacgattgacatcgcgattggtccttacgagacacttgtgcaaagtgaacctgttgttgtagacgatgccgcaattagcaagtatatggaagccgaaacgatcgtcatcaaagccgatctccaccaaggacaaggcgtcggcaaagcatggggctgtgacttaacatacgattacgtccgcattaatgcaggataccggacataaggaggcgcctgatggcaacagtggtgatcaaaatagggggaagcatccttgaagcgttagaggaaggattttatgagggagtcgttaaacgggctagcctaggcgacaagatcatgatcgttcacgggggcgggccagcgattaacaatctcttacaagcgatggcagtagaatcacagtttgtgaacggcttgcgcaaaacaacggcagaagtattaacagccgcagaaacagccttatccggccaaatcaacaaacagcttgtccgctctctttatcaggcaggcgggaaagccattggcttatccggcagtgacggacatctattgaaaactatcccaattgacacagacaaactaggctttgtcggagcggtcgagtcggtgaatgttgatgtgcttttcaatgttgttaaagctggctacataccggttattgcgccgattggaatggatgcaaactatcaaccatacaacattaatgcggatacggccgctgctgcggtcgctaaagcgagcaaagcggaggagctcgtattcgtcaccgatgtagacggtgtccaaaaagacgggaaagtcattaaggaaatggatgaggttttggcaaagcactatatagaagagggcgttatctatggaggaatggtgccaaaagtgaacgcatgtttagacagtttaagcggggcattgacgaaagcacgaattgtcaacggcaaaaagacgtatcacccttccgcagggacggcaattgttaaacaaagtaacgtcctcacatcgggcgcttaaagaaaggaagagcaatggtgagctatttattcccaacctattctaaaaaaagcctccgtattaaagaaggacgaggggcatggctgcaaacagaagacggaaaagactatcttgattttatggccggcattgccgtttgcaatttggggcaccgccaccctaaagtcgtagcggcgctccatcagcaagtcgaccgcctttggcacgcatcgaacctcttccactatgatgtccaggaagaagcggcaaaacaattggtacaggcaagtgcgtgtgattatgtatttttcacaaacagcggtacagaagcgaatgaagcggcgattaagctagcacgcaaagcgactggaaaaaatcatattgtatcgatgaaacaatctttccatggccgaacacttggaagcatggccgcgacagggcaagacgggattaaaagcggttttgggccaatgctgccgtctttttcatatgctcagtttaacgatatggcttccttgcatgaagcggtctccgaggaaacagcagcaattatggtagaaatcgttcaaggcgagggaggcgtccatgtcatgacagcgtcttttgccgaagcgatggtggccctttgcaaggaacagaatttgctgctcattgtcgatgagattcaaacgggcatgggacgtaccggcaaactgtttgcctatgaacattacggcctcgatccagatattgtgactgttgcgaaagggctaggcaatggctttccaattggagcgatgcttggcaaagcgtctttaaaagaagcatttggcataggcagccatggttctacgtttggcggcaatcctttagctgctgcaacggcaatagcggtcttagccgaattaagcgcagatggcttcttgccagaagtggaagagaaggcggagcgttttgttgcttatttaaaaggggagcttagtggcattgcaatcgttaaagatatacgccacaaaggttttttgattggcattgaaactgcgataccggcactcgacttaattgcagcgtgtgagcaacaaggtttgctgctgcttccggcaggcagccatgtgacacggctgttgccgccgcttaccgtgtcagaaagcgaatggcgcaaagctgtggcgatcatcaaacaagcggcaacgatctatgaacgagagaacagcttttcctcttaaaaatagagggattgctgcgcctataaatgaatttttataacttatatagaataaatataaattttggggtggtgagcggatgaaaggctcgatcgtattggaaacgggagaaacatttgtaggtaactggcatggcgaacctaagcaagttgaaggcgaaattgtcttctttactggcatgacaggttatcaagaagtgataactgatccatcatttaaaggacaaatcgtcgtgtttacgtacccgttgatcggaaattacggcgttaatgaaagtgattttgaaagcagcaagccgcaagtcgaaggcgtcattgtttgcgaagctgccagtgacccatcacattggaaaatgaaaaaaagcgttgtcgactacttaagtgaacaccgcattccatatatgtcaggggtagatacacgggcaattgtgaaacgaattcgccaacatggagacatgcgtgcagtattgacgactgattcccgaaatgccaatgtccaggagacgaggcttttgtctgataagtttgttgttgccgatgtgagcgtcacagaacctgtcgtttacaacgccacaggcacaacccatattgccgtactagactatggctgtaaacaatcaatcattcgttcacttgtcaaaaaaggcgcgaaagtgacgcagcttccatacaacacagattttgctgtgctcgaagcacttaaaccggacggtgtccttctctcaaatggacctggaaatccaaagcagctgcaagctttgttgccagacattaaaaaggtggcggaaacgtttccgacgctaggcatttgcttaggccaccagttgcttgcattggcttacggaggggacacacaaaagctccgattcggccatcgcggcgcaaaccagccggtgcttgacagctgcacagggcgtgtgtgtatgacttcgcaaaaccatagttatgtagtgacagaagaatcgctcgcttcatcgatccttgaacctcgtttttacaacattaatgatcgatcgatcgaaggcctcgttcatccgaaacggccagtcatgagcatccagtttcatccggaagcaagcccaggtccagtcgattcgactgaaatctttgatgcgtttttggcgccgcttttaagcaaagggagagatcaccaatatgcgtaaaccacacatcaagacggtccttgtcattggttcagggccaattgtcatcggccaggcagcagaatttgattattccggcacgcaaggttgcttagcgttaaaagaagaaggcatccgtgttgtgctgttaaacccaaacccagcaacagtcatgaccgatgattcatgtgcggatacggtttattttgaaccgttatcggtcgagacggttgtcaacattttcgagagggagaaacctgacgggctgttggcgacgctaggcgggcaaacaggtttaaatcttgccttaaagcttcatgagcaaggcttgctcgctgcctatggcgtcgaactgcttggcacgccgattgaatcgatccaaaaaggggaagaccgtgagcaatttcgggctttaatgcatcaattaaacgagccggtgcctgatagtgaaattgtccatagtgcgtctgaagcgctacgctttgctgaacaagctggctatccgatcattgtccgtccagcttacacgcttggtggtgcagggggcgggatcgccgattgtgaaaaagagttaaaagcaatcatagaaaatgggctcgcccaaagcccgataagccaatgtttaattgaaaaaagcatcgctggctttaaagaaattgaatatgaagtgatgcgtgatgaaaacgacacgtgcattacagtttgtaatatggagaacattgatcctgtcggcattcacacaggcgattccattgttgtggcgccatcgcaaacccttaccgataaagactatcaaatgctgcgtgccgcgtccttaaaaattatccgcgccttaggaatcattggcggatgcaacattcaatttgcgcttgacccgaacagcgaccgttactatttaatcgaagtcaaccctcgcgtcagcaggtcgtcggcgcttgcttcaaaagcaactggctatccaatcgcccggatggcggcaaaactgtcaattggctactatttgcatgaattgaaaaatccggtgactggctatacatacgccagttttgaacctagcttggattattgtattgtcaaattcccacgctggccatttgataaattttttaccgctaaccgcaagcttggtacacaaatgaaagcaactggtgaagtgatggcgattgaacgttcgtttgaagcagctgtccaaaaagcgattcgctctttggaaattgatgtagccggcttggaaatgccggtgcttagcggcagtggggaaaaggagctttggcagcacgtgctccaagcagatgacgctaggttgtttgcgctatttgaacttttgcgccgcggtgaaacgtgtgccaacctccatgagaaaacaaacatagatatgtttttcttgaagaagttcgaaaagctggtgcacttagaaaaagaaacaaagcagctatcgctcgaatccctttcaaaagaagcgctgcaccggttaaaaatcgctggtttttcggatgaaacgatcgcctgttacttaggggcgccaaaggaaaaagtgacagccaaacggatcgattggggaataaagccagcttataaaatggttgacacatgcgctgctgaatttgaagcagcaactccttatttttactcaagttattacggagaaaatgaagccatgccgagtacccaaaaaaaagtgctcattatcggctcggggccaatccgcatcggccaaggaattgagtttgattattgttcagtccatggcgctaaagccgttcgcaaacaaggctatgaagcaattattatgaacaacaatcctgaaacggtaagcactgattatgccaccgcagatagactatactttgagccactctcttttgaagatgtatacgccgtttgcgcgttggaacagccagaaggcatcattgttacattaggcgggcaaacagggattaaattagtgcaggagctagaggaagctggcctccctgtgcttggcgtatctgctgatacgattgacatgcttgaggacagacaacgtttttatgcatttatgaacaacattggcgtcccccatattcctggcgaaacagccaatgatttggaagacgcttgctgccgggctaaggcaacgggctacccagtgcttctccgcccttcttatgtgattggcgggcaagggatggcgcttgtttctagtgaaaatgagctgacttcttatttacaaaaccatgagtacagcgggttgtttccattattaattgatcattttattgaagggatcgagatcgatgtcgatgtattaaccgacggcaaatcaatccgaatagctggcatgtttgaacatgttgaaaaagcaggtgtccattcaggcgacagtaccgctgttacaccgccccatactttatcggcgtctatgttggcgcaattggaagaagcggcgaaaaaaatagcgactggcattcactttcgtggcctctttaatattcagtttgttgttgccggcgaccgatattatgtgattgaagtcaatcctcgggcttcacggacagtaccacttcttgccaaaatttacggagagccatttgtcgaacaagcagtgaagcttatgctaggctgttccatcaatgagctggctccaccgaaaaaacaaggcgattttgttgccgtaaaagcaccggtgttttcatacagtaagctagcagggctcgatccacttcttggcgcggaaatgaagtcgactggagagttgctcatgattgggaaaagtgtagaagaagcgtttgccaaagtgtttgctccttttgaagaaccaatctctttgtataaaccaagagaagagaaatcggtttttgtggatcttgcggatgagcataagcacgatttttctgagattttgcagaaactggaacaagtagggtgtacgttagtagaagacgattttgccaattggctagaaagcccccatgcgtgtgcgttaatcagcgtgccgcctcttggtaagcgtgacggagcaaatatgcgaatggcagcactggccaaacaattgaccgtgatctcagcaaaagagacagccacagccatgctcgcttattttgagcaatcgaaaaaaagctgcaagcccatccaggaatggcatcgcttgcgaaaaacggaaatggcaggggagacgaattaatatggagacggtaaaaacaaagttgacagggaaacacttgctcacgctgcttgactttacgccaacggaagtagcgcagctgttagaagaggctaaagcgttaaaagcagccttgaaaaaaggagagcctcacactcttcttgctggtaagtcacttgggatgatttttgaaaatgcttcaacacgtacacgcgtttcctttgaagttggaatgacgcaattaggcgggcacgccctttttcttagcagccgcgatttgcaaatcggcagaggagagccggtgaaagacacggccaatgtgctttctcgttatgtagatgcgattatgatccgcacgaattcccacaagaaagttgtggaatttgcaaagcattcttctgtgccggttattaacgctctaacggacgctttccatccttgtcaggcgctggcagacgcattgaccattatggagcataaaggcacattggctggaaagaaacttgtctatattggcgacggcaacaatgttgctcattccctgcttgctgtaggcgccaaaacgggcatggatgtcacagttgctagcccgaaaggttatgaagtcgatcaagcgatttttgctaaagcgcaagaagctgctatgcaaacaggcgccaagctggtgagcacaaatgaccctgaagcagctgtggcagacgctgatgttctttatacggacgtgtgggcaagcatgggctacgagcaagagcaaacgagcagagcagaagcgctagctccttaccaagttaatcataagttggcaaaaggagccaaagacgattatctgttcttgcattgcttgcctgcccatcgaggcgaagaagtaaccgcagacgtcattgatggctcccattcagccatttacgaccaagcagaaaaccgccttcatgtacagaaagcaattttggccgcccttattcgttaaccgcacaatgcttcaaggaccagtacgattactggtccttttgcctctcatagaaaaggcgatttcttgtttttagcctgatcttttttcccatcttgcacatagaatagaataacgacgaataaaagcaggagagataaagaatgcccgtctatgttcgctatattgaccttagtgggtatacgtacagttatagcttgccagagcgtccaaatgggtatgcagtgtttgtgatggcggacgacgactctccttataaagaaaaggcacgtgtgcttgcaaacagcttgattgaaaaaggttacacggtattaactgccttccgcctaaaagcacattggggttcgccaaaagcggttgctcatgccaggcaggttatttcccttttcataaaacaagaaacggtgaataaacggatttttatttgtgctgaaggggcgagtgccctaattgccaaacaactactagcggatgcaacccttgaagtgagggctgcagctttaatcaagccagtgttgtcattagaagcggcctttcaagcgattaaaaaagacgaattggctggcaaacgttttttaaaggaagtcaaagcagcatacaagctaaacggacaaatcgatgtcgcatatttgcgcgctattgaccaacagcagcgcttaatcgatcgcaaccgcccacttgcggcaacgcgtatttatcaattattttctgaagcaaccgcacaaccgactaacctttcaagcgcccaatatgcagactattactttttcgcttctttacaaaacccagcagagttaagcaagcaaatggcttccttttttgcttctttccattgaaagttcgaggatgatgacgaaatcgagtaacaaggaaaggggagataaggacggtgaagcatgtcaaaattgcaggagggcttgggtttattggctttcatttggcgcagaagttgcttgatgaaggctggttggttacagcggttgattcattagaaaatcgtagcgagttaaagcttgctttagaaatggagcttggccgaaatgcccatttcacctttttgcaaacaaagattgaacaggttgattttggcgatgcagatgtggtggtttatgcagccgataatgaaaatcgggctgctttagaagcggttttgcgcaagtgccagcctgactgtttatttgtgtttttgtcaacgacggatgtttacgaatatagcggcgaatggcgggtacagcctgtgactgaatatgggaaagcgatgctagcgcaagaagaaaacattcgcgtgacttgtgcagaaacggggggcgccgccgtcattattcgtttaccgactgtttacgggctccatcagccttatcatttaaaactaggcagacagttcgtatcttatgaggatgaaacaggcaaaacggaatccatgcatgatcttctttatattgacgatgtgacaagcgcgttagctgcagcgatggcaattgacagcgggcagcataccattcatttaggtagcggcacatccaatccgtttgaacgaacagggaagagcaatggccttgattaccaaaaagcccatgagctattaggcttttttccacgaacttctttagcagagggcattaaaaaataccaacttgcccacgaagaatggcaaaggcaaaaaaaactggcagcgatgtacgatgaaacaaagagcatggcagctaagcatccaaacacaaatcagtgacaaagatgacgaaaaacggcagttgcatttttcacaactgccgttttttcgtgttttactcggtcatactgtcttggtaaaaggagttttcgtaaaaatggaggcctggatatttatcttgcgctgtcctcatttggaattcattctcaaacaaagcaacaatccggccttctctgtcggtgacgaggttgcgctgtttctctttaaatcgtttcatctcttcttcgccgccgctgatccaacgggcaaaagaaaacggcaaccgttccatctggatatcgacattgtattcagcgtggagacggtgttcaagcacttcaaattggagtacgccaaccacgccgacaatttgttgttcaacgtacttattataggttttaaataactggatcgcgccctcttccgttaattgttgcaagcctttctcatatgatttgtgctttaaagcttctttcaccgtaatgcttgcgaagtgctctggtgagaaatgaggcatttcattaaactcaaacgattcaccatcaacaagcgtgtcgccgattcgaaatgtacctgggtcaaataaaccgataatgtcgccagcatacgcttcatcaacaatgctgcggttttgcgctaaaaattgtgttggctgcgagagttttagcggtttgttggtccggacatgcttgacgttcattccccgtttaaatgtaccagaagtgatccgcaaaaatgcgacgcggtcccggtgtttagcattcatattggcttgcactttaaaaataaaaccggaaaaatgttcccgagaaagggggtcaatcgtcccaatcgagctctcccgggaagctggcgcaggagaaagctttaaaaaatggtccagaaacgtttgaacgccgaagcttgaaatcgccgaaccgaaaaatacaggtgtcagttcgcctttgtcaatccgttctttgtcatattcatcaccagcgacatcaaggagttctagctcttcccggaactgacggaccagttgttcatcgccaattgcttcatccaacttcggatcgtctggcccgcttagttgaatcgtatcaatcgcctttggattgtcaggattgtataattctagtttttgctggtgacggtcataaacagctttaaatgattggcccatgccaatcggccagcccattgggtatgaacgaatgccaaggagattttctagttcttccattaattcaaatggatcacgcccttgacggtcaagtttgttaatgaacgtgaaaatcggaatattgcggaggcggcagactttaaaaagctttttcgtctgtgcttcaactcctttggcagcgtcaattaacattgcggcagaatcagcagcagtcaatgtgcggtacgtatcttccgaaaaatcttcgtggccaggtgtatcgagaatattgacatgaaagccattgtactggaattcaagcacagagcttgtaaccgagatgccacgctgtttttcaatttccatccaatcactcattgcgtgtttgctatttttgcgccctttcactgttcctgcttcccgtatggcaccgccaaaaagaagcaacttttcagttaatgttgtttttccggcatcggggtgggagataatcgcaaaggtacgccttgctaaaatttcttcttttaatgctgggttcatgaatcaacctcatttccaaatcgatttttccattatagcaagaaacggccctgctttcatctttgaaaagcaaatcggtccatccttgccatcgagcaaccgttcagttatcttaaaagagaatacatataaaggggttatttcaatggagcaacacgaaagaaatttgaagtttatggaaatcgccatgaagcatgtacctgaagcgcgtaaattgctagaaggcaaaggcatagaagtaacaatggatgaattgcagccgctgctttcattgttgcttcatgtgatgaacgaagcatacgaacttgggttaaacgagcaggaatgaaaaaggataaccagtaagcgcaaaatagggcacaggtttgtttacaagcatgacagaacgaagtaccaaagcaggctgatacaaagcccgtgcgcttgctgtcatcccaataatggcctgattcgacagaatgaaagtagggaagaaacgatccaccaatggtttaagcattgatggataaaaaaggggcataaagctaatcgctatctttcgtttcttttttactttgccaaaattctttggccgcgccaatgataggcttgacttgttcaataataggagagattgcttggataagggcaatgacttgaacgagctggcttgcgttgtctaactcatcaggcgtttctccctctgtttctgccgctgtttctatttctgcttcttgttcgattggttcgctttgtcttggcggccttgggccaaacatcatggttgagaagaagtcttgctcgctattgcgcatatgtgacgcctccttctgttcctttcattttatattagtgtatagccattcgccgtaatcgtgagacggcatgcgcccgttctcgcgcattatttagacaaaaacgttctggacagcaacaaaaatggttgctaatattaggatcaggtactaattttaaaaacacgtcttttaaagtaggaaggggtagacgtatgccaaaggcaggaattttagggctcggtcgttatgtgccggagaaacgtgtcacaaatcatgatctagaaaagtttttagatacatctgacgaatggattaaaagccgtactgggattgaagaaaggcgttttgctgaaggtgtggaaacatccgaaatggcttatgaatcggcgcttagcgccttaaaagctgcgaagctttcagcagaagagattgatttaattttggtggcgacggtaacgcctgacatggtttttccaacggtctcgacaatgatccaagaccgccttggtgcaaagcaagcagcagcaatggatattagcgcagcttgtgcaggttttatttatggcgtggctacggcacagcaatttattgaaactggcgcctataagcatgtgcttgttgtgggtgtagaaaaacttacgaaacttgtgaatatggaagaccgtaacactgccgtcctgtttggcgatggagctggcgccgctatcgttggacctgtggcagaagacaaaggcattctcgcttttgatcttggcgcagacggttcaggcggcatgcacattaataaaaaaggcccttttcttgaaatgaatggccgcgaagtgttcaaattcgccgttcggcaaatgggggatgcttctttacgcgtgttaagcaaagcgggcttaggtaaagaagatgtcgactttcttgtcccccatcaagcgaatatccgcataatggaagcctctcgtgaacggttggaacttccacgcgagaaaatgtccgtaaatgtaaacaaatacggaaacacttcggctgcttcgattccgattgcgctagtggaagaaatcgaacaaggaaaaatcaaagagggagatgtcattgtacttgtcggctttggcgcaggcctagtgtggggctcattggcgattcgctggggccgctaacgaagactaatgatggaaaagtagaaagaaaaaaggagcgatacaaagtggaaaaacgacgtgtagttgtaacaggccttggggcggttacgccgctcgggctcgatgcaaaaacatcttgggagcaggcaaaagcaggaaagtcggggattggctatttaacccgcatagatgctgctgcttttccgatgaaagtggcggcagaaattgctgattttgacccaactgctgcgattgatcgcaaagaagttcggaaaatggatcgctttacccagtttgcggttgtttcagcccaagaagcattagcggatgcagggctagaaattacacctgaaaatgctgatcgcgttggcgtttggattggctctgggattggcgggatggaaacgtatgaaaatcaattccgtatctttttagaaaagggtcaacgccgcgttagcccatttttcgtgccgatgatgattccagatatggcgagcgggcaagtatcgatctttacaggagcaaaaggcccgaattcgtgctctgtaacggcgtgcgcatcagggacaaattcaatcggggacgcctttaaagtgatacagcgagggaatgcggacgttatgattacaggcggaagtgaagcgcctattaccaatatggctgtggctggtttctcatcagctaaagccattacaacaagcgatgatccggcaacggcttcgaggccattcgatgccaaccgcagcggctttgtcatgggtgaaggagcaggcatattaattttggaaagcttagagtctgcaaaagcccgaggtgcccacatttatgcggaaattgtcggctatggctcaacaggggacgccttccacgtcaccagccctgctcccgaaggtgaaggaggagcgcgcagcatgcaggcagcgattgacgacgccggtctagctcctgaagaggttagctacattaatgcccatggaacaagcacagagctcaatgatccttatgaaacaaaggcgataaaaaccgtgtttggcgagcatgcttataaactggcaataagttcaacaaaatcaatgacaggacacttgcttggagcggctggagcagtggaagccattttctcagtgaaggcaattgatgaagacatcatcccgccaacgattaacttggaaacgccagaccctgagtgtgacttagattatgtgccaaacgaagcgagacaagcacctgtccatgttgctttaagcaactcactcggctttggcggccacaacgcctcactcgtatttaaaaaatgggttgaataacacatacaagcggctggttctgttccagccgctttgttccgttgtgaagggcatagctgggcggtaaggggaaaatgaataggcgttgggcgatagccgaaaagattttcaaacggtatgataggagcatacattcgataaagtgaggcgatttgatttcgattgtatcaaacagatgaacaggctttgcttatacgtaaaacgttcggatgtgttcgctttgtctataacaacaagatgttagctgaacgagaagagacgtatgcgttactgccaattacaaaaaagagtatgagtggttgaaagaagtagattcattgtattcgagtggctaacattcaagaaacgtagcaaaccaaccagtgtacttgtgaactaactcttgatagagactacaactctgcactgaacatcaaaaaagaagggattcgcttgttagttactacctaatgcagatagatataaactcttttcgtcagctaccgaaaggggcgattacccaagaagcccccacttcaaccgacctcgcaagggtgaagtgggggggagttcactttgatcctaatgcagaggggcttgtccaattgaggctgtttctggcattagttccaaataaacgagctccgtacagacttgtggaatagcccgtatctgccgttagccaatgccgatattcaatcgtgttgccgcccacgacagagctgtacgtatagaaaggtaaggggagaggcaaccttgtgctatccccatttagtgggttgaatataaatgaacccgtgtgcccttgtgcttgattagcgttccatttgtaacatgcccatgtattacttggattggaagtgttgtaacaagtccgactgaccattcctccccctctagcaacggtgttatcccttgacaagctaatgatgtcatttgaagtggagtaaatcgcattatagttgttttcgcagttcactgcgttagccccacatgcgaaccactgagaccatgcagcacggcgtttttgggcagccgttccactggcagagcgataacggctagccatggatgctgcaactacttgtgatgcggtgttagtcaatactcgattatggaacgcaacatttgatccaagacctgctgagtctatttgaaaaacaccaattcctgcattccaaaacgcacgtgcgtactgaccattgggatttgtattttgaaatgggtatagccgagaatgacctgtgtcccatctgccgacagtcattggggatggagtcagtgttcgattgttccctgtaacttccggccaagtaaccgataacatgatggcggccaagtgattggttgtcagtcccgtgttactattattattaccggctgccgtaattacgtccgttgtcggaacgtcaccgaatcttgcagtttgcatgactgaaaactcgtctgttggttcgatatccagaacaggtggcacgttatcctcgacataaatttcctcttgttccacataacctttttcaccatttagccataaagtatacgtatagtcactaagtgagggagcaacgtcgccgtcaacaaaaatatctgcaaacgaacccgaaccctcaatcggaataccttcttggaagaattcattaagtgcggtttcttcaatccaaacaacttttccttccgaatctagccatgcggcatataaataagcttcagacagacttacccctatattggcaaaggaagttccaatctgatagtctaaagaatcacggtctacacctctataattatccagcccataagggatttcataatcaacgtagatcacgccttccctcgaaatctcatttatttcttccgtttctattgcgttccatacgacttcagcaactaatgagctgtctgtagttgatgtgagcataaacggcgctggttctccgggacggatgtttttcacaggagcattggctgtaaccgtttctaaaatcactccatcttccgacaagagttccacgaataagtccacttctccaataacgtttgggctttcattgcgaaaaagtcccatcgcttgccaatcacctgtctctaccacagtcaatgaattctcaagtattgaaattccttgcccaaccacataatttgtgtaattcgggccaacgaaccctactacagaccgctgaatgctatcatccatttcggtttcttcgatgctttgttgcatgatttcattttgattcaggtctaattcaggagcgaaatcctccgaattaatattgctataaatttcccagacttcaggcatctttggacgttcaattctcaatttgtttgtgtcattagatgtagttaagggattaatgaaggaaacaccaagccccgattggttacccggtatgtccgattcaaaagattccgcgttgataaatgaggtgaacagcaatgtgacagatagaaagatgacagaggatgctttgagtattttcattcacttcatctccttttttcattttagaatttaatgacagcttcacgaccaatgataaatagagcaccccctaaccaaagtggctactctttctattttcatcacaaaaatagtaggctgttttacacgtttctcttagctgattggctgtaatgaaaagagaaaaggagaataaccgccagttataaattgttttaacgagaaccactctaataaaaacctagtcgcctcgataaatacgctactagtataccgtataaaaggcaggaggggatcttttatttgtaaaattccccgaagattggcataattaattgaatgaagtaaaaatcagtcgtctttgtctattgaaaatggtttgcgaaattgtgtgacagtttcagagcattttttacgtctgtctgcgaaagtatacccgaggaataatagccaaacacagaaaaatctaggcaaaaaggagtacgcttatcgatgttcgatgagcgtactccttttcattgaatttcttggctcgttttgtccccagcctctttgtttatgttttctcagcgatccaagcaagggcttggtcttttgtagcaatatgcccgtcaagttgtaggcattcgatttcgagcaaccattgtgtaaatacaggacctggttggtaacccgctttgagcaaatcagctcctgtcaaaagcggcttaaactgtgtgcgtttttcggcataacgacgtaagagcgggcttagcggaagttcggcctcgctataaaagcgaacgatttcgcttgaaattcgcgccaagtcgcgatgtgcttctccgagtgaggctgtcggcgcaagttgttgccaaacgggcaagcttgtttcttctaccaagcgtttttcttgctttgtaagagcgtaacgacttgcgacgtcaagacgagtgcaatcaacagcgccagccagtaaaaagaacatgccatcattcaaaccatgttgctgcaagttggccatatgccgccaggctcgctcggaaaaacgggaaccaaacaacgttgtccagacatggaggtcagccaattggcgaaagccttcaaaaagcacgccttcattagctagcaaatcaagttcctgccgtaagcgtttagcactaatgtggtgcagagcagcacctgttttagttgcttggtgtatcgtctctgaggagaggctgaagtttaggcgcaggccaaaacggacagcgcggaaaagccgggtcgggtcttctatgaaactgagcggatggagaatgcgaatgtgtttgtcgataagcgcttgttttccctgaaacacatcgagcacgttcccgaatgaggatcgattgatttggattgccatcgcatttatagagaaatcccgccttgctaggtcttcgtaaatcgaagccgggcgcacggtaggcaatgcccctttttgcaaataaaactcttttctacacgtcacaatgtcaatgtcttgttcgttggcccacgtagcagtgccaaatgactcatggctgcgcacgcttcccccaaatgcggttgccagttgcttggcaaaggcaattccatccccttcaacgactaagtcaatatctttatgtgggcgctttaagaaaaagtcgcgcacaaggccgccaactaaatagacaggtacttggagttcgtcggcgaaagcaccaatcttttgcagaaaggaacatgtttgcttcccaaaataagacgcgagctcagaaggggcaacggcatgcttattcgggtaaagcgaacggacgatgtctgttcgagtcacaatgccaatcggttcgttgttgtcgccgacgacagggagacggccgacttgattgtaagcaaggtgggcacaagcggcatcaatcgaatcgtttgcccgaagcgtaatgttaggcatgctcatcacttcggtgacttgagcttctcccatgccaaactggcgtgccttggcgaggtccatacgcgtaataacgcctgctagtgcccccgtctcatcgacaacgggaaaaccgctatgtcctgaacgaagcagcgtttgccacacttcatcaaccaattgcgatgtttgtacagttacaacaggcttactcattacagaagcgattttttcagccagtggcgcttgttgcaaatagtcgttgactacgcgcaaatcagcgcctttctcaagtaagtaggcacaggcatcgccatcactagccgtggttgaagggagcgttaaatgatgggtgctgctatataaacctagagcaaaaagcgtggcttctatagctgttaccgaaatttgttttcgtttcatctcattaatgagggtagtgatcggcacgcctcttttagtcgctttgatcgttcgccacaaattcgtctcaacagcagaagtgggcaacgagcgataaaggctttcctgcttttcatcttcccaatcgacatatacaatttcatctacttcgttccatgaaagcttgccatcatgctgaaaggaaaaatcggttttatagtcgtccaaaaatcgtttgacagcatgttggtaaataggcggtagcacaacaatggcatccggatgaattttttgggccgctgcaagaatagcaaggccatgaaaatcaagatggttgaggctgacaattgctttcatataagccgcctccttttgcttttttctcttctctagtagtataccaaaaaagcagcgggctaagacgctgctttttaacagaagtaatccatggccagcccttctccgccggccattaggtttatatttgttgggggggaagcttgtttgaaagcgtcggctagaatggccgcctcgtcagtggtaagaaacggtcttccagttgacgctgttttcgagaataacccatgtttgcttaactgatcgttcagacgatgataaaaacgagctgttttgaaatggcaagatagagagaatacccagtcgctcacacgctcttccgcttttttagctacgggccgcatttctggcgcttttgtataacgtaacgcgtggccgtaagcgagcaggctatttgcagacgtatcgcttgttgttttttcagttgatacgacccgctcaagcggtgctactactgctgcatagtttggttggacgcctctatttatatcaagagccgtcacacgatccaggcgaagccctttttccatacagaccactcctttataactgttattccctgttatacgctgtttgaatcaacgatagcacagcaagcgcaaaaaaagcccatgccaccctaaatggcatgagctttcaaactgtagtcaaacgctcgcacatccttcgttgtttgccgtggctgacaagcgctttctatcagtttgtctaaagaaacttagacattgtgtaagtttcatttattcggttattgtctaaggcgttacttggcaaaaatatggtcgccgataacgagtgtttgctcccgagtcgctacccaaccgcttgttgctgttttcgggttatagaaataaagcgattgttgaccttggccccgaaacgcgagggcttctgtcacagctcgtcttgactcgtcatcaggctcattgttaatggcgccatccaagacaggggaaaaggcataatggcctgatggtgtcacttcataaatcacatcgcgcacagtatctggataattttcattgtccactcggtttagcacgacagtcgctaccgcgactttccctgcatacggttcgccttttgcttcagcgctgactagtttagctaaaagctctctctccgcagcagaaacagctgcagggatcgttagcgtctcgccagcttcaatcgcagaatcagaaagatcgttgactttcataatcgctgcttctgggacgccataccgttcgcttagtgtatatatggtctcacctggctgaactgggtgtgtaagttgttttgcatcggcaatttcaagcatagcaaaagacaatccaattgagccaaaaatgaggaatataagttttttaatcataaacctatacaactcctatcaagtaaatctagtgtgcacaaaggttgcacgttaacactgtaacagattctcatcaaaaaagagctgaaaatgttttccaagcttcgtacaaaagacagcaaatgggatcgtggcaacgctgaagccaatttgttacgcaatggttacaattagagcctcgttttacagttgtgtaacagttgaggagaatttccagttgcttttttggaatatggcggcgatcaagccgttaatggccgggctaattgttctattacaaaacgtttcaagatgccactatatgaatcttttaccatagaatccgattctttttgtatgctaggatgtgtgtgtatctggcgaacagggatacgaatacacagtacgcaacgattaggaggatattcatgaagaaattagttatctctacattagctgccgctgccatcgtaggagcaggcttttctaaccaagccgatgctgcaggccaatataaagttcaagtgaaagggccttacatctacacagctagcggtgattgcgtgaaagtcgacctaaatgagctaaaagagcaatttggcaacatcgattggtcgaatgtgaatttggaagatttagattttgttacggatcttatcaataaagaagaagcgccagcccctgctcctgaagaagaagcacagcctgaggcaccagaagtagaagcaggcgagccaactaacacacctgaagaacaagaaacggtagaagaagagccacaacaagaggaaaccgatgcatctggtgatgtgactcaagaagaacagcaaatggttgaccttgttaaccaagagcgtgaaaaagcagggcttcaacctctaaaagttgaccaaaagctaaccgaagtagctcgtgttaaagcgcaagacatgatcgacaacaactattttgaccataattcacctacgtacggttctccatttgacatgatgaagcagtttggtatttcttataatacagctggcgaaaacttggctggaaaccaaacagtagacgcagcacacaatgctcttatgaattcacaaggacaccgtgaaaacattttgaacagcaactacacagaagtaggcattggcgtagttgacggcggtccttacggcaaaatgttcgtgcaattgtttaaagggtaacactccaaaaaaactccgttgctaaagagcagcggagtttttttgtttcagcaagttaatatatggcgtttattttcgcaattggacttgctcaacgcggtggtgagcgccttttgttaagatcaaatctgcgcgaaggcgtgttggcttaatgttcttttctaaattaacgccattaatggtatgccaaatcgattccgccattgcaaccgcttcttcatccgttaagtcgcggtagcggtgaaaatacgactcgggtttttggaatgctgtgttacggagcagttgaaagcgctcgatataccaagataatatgtctttttcctctgcatcgacataaatgctgaaatcaaaaaaatcagagacaaacacatggggcatgcgcttgccttttcggtttacttgtaggacattaatgccttcgacaatgacgacatccggttctatcaacgtttggatatgatctttttcaatgttataagtcaagtgagaatacataggtgcttttacgacaggcgtgcctgcttttaagtctgtcaaaaaagtaagcaggctgcggatatcgtaactttctggaaagcctttccgtttcatgaggcctcgttcttccagcacttcatttggatatagaaagccgtctgttgtgacaagctccactttcggagagccgggccatcttgaggccaatgcttgaatcagccttgcggttgtgctttttccgactgcaacgctcccggctatgccaatgacaaagggcacccgcttccgttcccgctttaaaaagcgatttaaatcgtcatgaagcctaacattatggaccattcgtttataaagtaattcagataaaggcatgtatacatcgttcacttctgcctcagatatcgtttcataaatcccttcgaggtttttccgctctttttccgtgagaggagcgctatgcccgtcatttagctgtgcccattctgcacgagtgaagtgggtaaaagcctctaagctttttgttaattcatccgttgtcataaggatctcctttgcgggttgagcttacttcaatagatgaagcgtagcacggctgaaacggataatcaagaatagaacacttgagcgaacgtatacatgtaggaaaagatttgttcacacgcctgacaaatcatcaggtagtttttgcaggctttctagcaattttcgaggaatggcgaatgtgtggctgtttaattgcaattgttcgctttcgcttggctgtgccgcttgcttctgcttgacagcactcatttcatgatggatatgttccattttttcatcgagtgcagcagctgagtgggcggcttcagttaattctgaaatgagctgttttggtacattctgattgtatttataaaagatcttatgttcgaggctggcccagaaatccatcgcaatggtacggatttggatttctacaaatacttcttctttgcgtgcggatgtatagacagggacttttacaatcatatggaggctacggtagccgttttccttaggctttttaatatagtcctttacagtgactacgtgcatatcgctttgttttctcaacatttcctcgagccggtaaatatcagagagaaacgaacaagtaatacggattccagcaatgtcttggatggaattttttaagacatgcaaatggaaaggaatatttttgcgcctcgctttttcaaaaatgctttccggcgatttcaatcgtgtttttacatgttcaattggactataatcatgcattagttcaaattcttcttgcaaaatggaaattcttgtttccatttcgtctaaagcaaatttatacatcatcataaattccgttaattgttgttttagctgttttgctttttcgaaagtaagcaaaggatcattcattgtcagtcacctctgcctttcattttggatttggcactaagcaaagtcaagtgtaactctgttttgaaggatgtgagagtgtgggaatcgtcaagacaaacagatggattgagctatatgtggaccattacgaggagcaatcggtccaagcaaggtataggcaactatttatccagccacttcaatcccttttcgcctattcgacagatcagcagttggccacttatttgcaaaaaatcggtttatttttgcccaaaacgaggaaaagccgcttaaggcgatttttgcactcagactgctggactgtagctggcgaacaatttaatgcgttgaaacaaaaatggcaggggcccaatgtgcccgttttcttgttaccagcaaatgaagaacataaacggcttcaggcagaactaggagggaaaatggggctcggttttcctgatggcatcgttctttttatttcaggtgacattgaggagaacgacttaaaagcattagtcacccatgaataccatcatgtttgccgattatggcgcacacaggaaaccgagtcgtctattacgttattagaatcaatggtgatggaaggacttgctgaattagctgtaatagaagaggtcggcgaagcatatgtggcaccgtggacgaagaagtatgacggccattggcaagaagaatggtttgtccgctatttggaaccgaatttattgagaaaaggaagaagccattacaagccctttctctatggcgacgaccgggcaggcattccggctatgctaggctattattacggtttcaagctttgtaaagcagcggctgaacattctagtaaagatacgttagcgtttctggatgaggatgctgagtcagtgctgcgcattggcacggaaacatgaaaacggtgtttaagatttgcccctcgtgaccatactgactccaaagagcatactagtgaggaggatcgattcagatggtcatgatgagagatgtatgggtaaattggtttgaaggcgaggagaatggatacaatgtgtgcccgttccatgaatggagaagtgaagaccgcatagaagtgctcgatcaagtaaaattgttgaaagtggacgagaagctaatggactacatagaggaccagcttcttgatttaccaatggaattgctcaaagaagtgtttcaaaagagctatttgcgtaaaaacatgtcacgcatccaactcgattattgttttattgctacggatgggaaacggattattgcagtagacacaatgggatacaaaacgcccattagaaagagccggttaacgccacgccaagaacaagtggtgtttgagacattaactgaacaagacgttccttatttccaattagaaatccctctgcctgcaaaagactaccatttgctttccccgagtcctgctgagttagcgggactgacccgcaaggaaaggcagctgaagcaactgttgctgatggtgcttgatcaattgcagacaacaggctcagatgcggaaataaaatattggtgtacagagtgggaccctctgacatacaaaaagcttcagcaaaaaggccgtacagaagtgtgggaacaattgctaaacggtgtccgtgcaggttggagccaacgccattacaaactatgtgaagcgatggttaaaggccattcctttttcgagaaattatgggagttggagcatccagagcgggtgaagtaatgttagcgcgttaaagcaaggggcttgctttaacgcgtcgtttttctatttacatcgtatgcgctttcttttataatggaagcgacaaaaggaggcacggatggatggagacaatggactcatttgcgtatttgattatgaaaattttaacggttgttttgttagtcggcacgcttggactttccttttttgttgggaaagtgtacaagaaaacaaatggctattaagaaacaaattatcattacttaaacggaaacgacgtagcacacggctacgtcgttttaacgttaggacataaaatgcttatgttttatcaggttatcttctctttctgcctaagcccatcgcacgctctgcttttacgagcgttttttgtgctttgcggttcgctttgtctgcacctttgtccaatatcgcatcaagttcggctgattcaatcaactcatagtaacgtgtttgcactggttgcagcgcttcaatgactgcgtcggcaaggtcggctttaaaagggccgtagccggagccttcatacagttgttcaagctctgtgaccgatttgccagagcaaagagaaaaaatcgaaagcaagttcgagaccgctggcttttcttcacgatcaaaacgaatggtaccttctgaatcggtgacggcgcttttaattttctttgcaatcgtctttggctcgtcaagcatggaaatatagcttttcgcattgggatttgatttgctcatttttttatgagggtcatttaaagacataattcttgcgccgactttcgggatgcgcacgtcaggtacagtaaaaatatcattgtacttagcgttaaagcgctccgccaaattgcgggttaattccaaatgctgcttttggtcttcgccaacgggcacaatgtccgtttgataaagaagaatgtctgcggccataagtggcggatacgttaacagcgcagccgaaacggcctctttaccgctggatttgtctttaaattgggtcatgcgttctaattcgccaatataggaaacacattgcatcatccagcctagctgggcatgggctggcacttccgactggataaacaatgtcgatttgtttgggtcgattcctgatgcgatgtaaagggcggcgaggctgcggatgttttcgcgtagtttcaaacgctcttgtggtaccgttatcgcatgctggtcgacaatacaaaagaagcaatcatagtcattttgcatgtcggcaaagtgtttcaatgcccctaaatagttgccaagcgtcaacgtgccgctcggttgaattccagaaaaaacggtttgcatacgttcaactcctgttttgtcactcttctccatcgtaaatcaaaatgcaagcaaacacaactcttccatctaaataaggccatgcataaagagggggaagagggacatacactagaacgaaccctattttttacagaggcaggtcggttaatgggttcgtccttgaaaacgtttatatagtagcaagccgaggttgagtgccacgagcaagataaaccataaaagcgaaaaagggacgtcttgcaaaaaaaagacgaacaccaataaagcgaggcaggcaacagcttggcaaagttgatacttgttcatcgaaagacactcctaatcatcctccaagaaagggcgttttagtggtatgatccgttccatcagacggtccatcttgtttttcatcctagtagcagcgattctggcagtaggatggttccattttaaaacagaatcgatctttcggcacgtggaagccattgtacatgcaatggaagaaggggtccatgaagggaaagcagctcctacctttgcgttgccgactttatctggaggcattggagaatttgatccaaaaaagggagcccattcgtatacaatggtccacttttttgcaacatggtgttacccgtgccaagaggaaatgccgttgatcgtagaagcggaaaagcgactaagacagcaaggcgatcattttgtcgccgtcaatttgacgagcgaagagacaagcacacaagaagtcaaggcatttttaactcattttaacgcgtcgtttgaccccctgttagataaagagggggacatccaaaaacagtatcaaattttcggtataccaacgacgcttattgtcgatagggaaggaagaattgtccggcgcattaacggggcgatggatgaagggatgctaaccgagctaccgccattttctgttgctggcgccggcctgtaaaaagccgtcaatttggctatcaagttccgtcaataactgccgtgccgttttttcctcaatcgttcggtaatgatggctgccttttggctcttcatcaagttcatctgcttttgcgaccaccgcttgcaacgggctgagggcaagctctccgttaggcaagtaagagtctgtatgcagcaaaatggccaatgcgatttcttttgcatgacgggggtgttccccaagacggattaataatttatgggcacgttcagcgcctttaatggcatgaatatcataggctttataaagcgagtagtcccatttgccgtttttgtaccaagtataatgcccgatatcgtgtaaaaatgctgcttttgcggccaagtcggggttgacgttttcattcaccgctaacgcacaggcgtggtaagcacagcgaatcgcatgagccatgccagagcgttgcaaatacttttgggcgatgtggtggtcgtaaagagcaactagtgttacttctctcatcatcattctccttccatccacacatttttttaataatctatgctataatgaatgccaaccgttgtaaagggggaagttatttggcaaatacccacgttttctcgagacgtgaagaactggtcaatgcgctcacacatggttttggtgcgcttttgagcatcttggcgctcgtgcttttaattgtttactctagcatgcacggtactgcttggcatatcgttagttttacgatttatggcacaagtatggtgctcctatatttatcttcgacacttgtccatagttttaagccaggcaaggcaaaagacgtatttgaaatttttgatcatgccgctatttacttgtttatcgcaggtacgtacacgccgattttatttattttagtcggtggtgcactaggctggacattatttgggattgtctggggtattgccgttgtcggcattatctttaaagtcttttacgtaaagaaatttttagtgttgtcgacgatcatgtatgtcgcaatgggctggattgccgtgtttgcaatgggtccgattatgtcaaccctgcctagtggaggcatatggctgttggtgcttggtgggattttttacaccgctgggacgattttttatgtctggcgtggatttttgtatcaccatgcgatttggcatttgtttgtgttggcaggctctgtctcacatttctttcttgtatttttatttattttgccagtaggcatttaaaaacgatctgggcagttgaccagattgttttttcttcgagcaaatagggtatgtagcaagcaaaagggacaatttccgataggggaaatgcctgaacgatgtcatcctttattgggcgagggagggagaggctgtgtatatttcgctacaagaattggcttcttatcttggcgttactcagtcttatttaatggaacaagctcatcttggaaatatacgtggcgtttatgacggagaaacgtggctttttaacaaaacacagtttgaaaagcttaaagaacagctggaaaaaaggcacaggcagtatatgaaagaagaagaggagattccagatgattgggatgcccatgatgaggattaaggatgaaagggagtgtatgtgtgtgtaaatggatgaaagtcggctgctctgctctgttatctgcttcattgctagttggtgttaacgggggaagtgttgaagcgacatcgggtaacgggatgcttgtacatggccataagcttgttggccaaacgctgtttgaaaccccgaagctctcaacgcgctttgccaatcagtcagggtacacgttcaattatccagaagacggagtgaggggaatttatgtgtctggtcactctgcaggaggagagcgctttcactcgcttgttgatttcgtcggtgaaacagggcttaatgcgatggtcatcgacattaaagatgatcatggcaatattacatatatgcctgacgagagttcgccttattacaacattgcaaagaaatacataaacgaccctgaggaaatgatgaatgttcttgaagaaaacgagatttatccaattgcccgaattgttgtttttaaagatacgactttagctgaaatgaaaccagagctttcgtttaaagaaaacggctccgtctggaaaaatggcaggaaagaagcatttgtcaatccatttttagaggaagtatgggagtataatgtcggcattgccgaggaagcagcacaaatggggttccgagaaatccagtttgattatgtccgttttccagaaggatttgaaaaccgtgatgaaacgctggaatatgagacaggaaaatacggagatgacgaaattgacaatgtgcaacgccgtgtaaacgcagtcaccgattttgtcgcatacgcccgagaaaaacttagcgtctaccatgtagatgtatccgttgatattttcggctatgccgcaaccgtgcctgaggcgccgggaattgggcaaaacttcttgaaaatatcggagaatgtcgatgtcatttcttcgatgatttatccaagccattggacgtcttttgaaggattggacaagcctgacttgtacccttatgagctaacagatggctatgccaaattggaaaacgggcttttagagcagctagaagataagaagccagtgtcgcggccatggattcaagactttactgctagctacttagggtcgggcaattatttacagtacggaaaagaggaagtagaagcgcaaatccgtgctttgtatgaaaatgacattaacgaatttttattgtggaatgcaggcaacacttacactcaaggggtcgattacgacaatccgtaaaagcagcttcagctgctttttttttgggccaatagggcaaactaaatgatgggtttaggacaaagatgaaaatggctatataaatgagtatgtaaaaaacgaagaaatggaggcatgaaaatggcaacttggtatgagaagcttgctgaatattttcctgttgaggaaatgaagtcaaaacagcatatggaactgttattaaaagaaaagggagacatttatcataaggaagagagcgataaccatgtgatgatgtacgtcgagaccgatgactttatctttgtcgattacttgtttgtggcaaagcaggctagaggagaaggactggggaaaaagctgttagagcgattgaaaaaaaagcaaaaaccgattatacttgaagtggagcctatcgattatagagacacggatacgcaaaagcgacagcgcttttatagtcgtgaagggtttaaacatgccaaatcaattggctatcgtcgtcgttctcttgcgacaaataaagtgacggaattagaaatcctttattggtcaccagagaatgaagatgagaatagtatatatgagaaaatgaagcacacgtatgagaacatccatacgtataaagataaaacgttgtatggagaatcctatgaagcagttgatgaagtattaacattaaatgattaagacggtgaacagtaggctcctgacaaaaaaaacgggagggcgaagcgctatgaaacaaaaaaagaaagctaaacaaaaacgaaagcgcctagcgtggaaagatgcttttaaaaagcagctagacaatttgaaaaaccgtcgtccgcaggaatatccttatccccaatcgaaaaaaagcattgcgtaatccgccgtacgccgtactggcggatttttttctgaaaataggtttatggttaggcaatgtcgggaagtgtgcattaataagaggatttcccatagtttttgttcaatctttgtataagttttttgcaacgactctatacaacagttgaacaaacttgtataataaaatggtgatgaagcgaacgataacggatacacttgtcacactttgattaaaggagaggttcaataagatggtcacactacttacatcccctagttgtacatcttgtagaaaagcgaaagcatggttggaagagcatgatattccttttgaagagcgtaatatctttgcatctccactctctgttgaagaagtaaaacaggttgtgcgcatgacagaagatggcacagatgaaattatttcaacacgttctaaagttttccaagaactggacgtagaacttgaatcattgcctttacaaaaattgtttacaattattagcgacaatcctggtctgcttcgccgtccgattatcttcgatgaaaaacgtttacaagtaggatacaacgacgctgaaattcgccgttttctaccaagaaaagtgcggacattccaattgcaggaagcacagcgcttagtaaattaatacgaaccttctacagaaacctctgtagaaggttttatttttcttgacattgaccacggcatgcgagagaataaagaactaacaaaatacgtttgcacccgtcagaaagcagatggattccatttttcggctagttatcatacaataggaacaaggaaggcaagctcactgtttccttgataaaggctacctaatgttaagattacaggagggggagcgagtatggaaatcgaacgagtaaatgactcaactattcggtttttcatcacgtataaggatattgaagcacgtggttttgagcgtgaagaaatttggtataaccgtgaacgtggtgaagaacttttttatgatatgatgcacgaagcaagcgacagggatgaatttgaactagatggcccgctctggattcaagttcatgcccatgataaagggttggaaattctcgttacacgtgggcaattgtcagatggcaatgtaaaattagaaattcctgtgaaagaggacatggaaacagacgagcaggaagatgttccagtccacacgcttgaagagaacgagctagatagtctcgagctgattattggttttaaagagctcgaagatgtaatctctttaagcaaagctgttcgccctgagcgagtgcttaatacactgtaccactacgaaggccgttatttcttgcatgtccaattcacgaacgatctttatacagaggatgaacaagacaatttgttgagcaggatgcttgagtatggctatgaatcagaattaacgattcacaggcttcaggagtatggcaaagtcattatgccagagaccgctttagcgaagctctattcaactttttcctaagtccgttcaggctgctagaatacgcttgttagccgagagagtgaaggcaagggatttacgccaacgacgttagcgagcgtttgttaccgtctataagagccataataggctcttttttttgcgcaaaaaaaggataaacgtaagattggtttaaataaaaaaagaagaaaggagtgtggtcattgcttcaagctttagatgaaaacgatcgccttattcgttttaccgataagcgcagttattcagaatggcggtacttacaaaaagcagggcgttttcgttgtccaatttgcaaccaacaagtaaggatgcgacttggaacaaaaagacgttggcattttgcccaccaaaaaagtgagcagtgcccatctggaggggaaggggagtcggatgagcatgtacgtggaaaacaattgctgtttcactgggcggccaagcagaacaaagcaacacaattggaaacgtatttaagggagtcaaagcaacgaccggatgtttacattgaagcttcctcgccgcttgcactggaattccaatgtgctaccctttccgccaaaacgttatatgaacgcaatactttgtacgcacgccaaggcatttccccagtttggattttcggaggaaaccgtttaaaacggaagcggcggcaaatgttccaaatccaccaatttgaatggtatgggctccaatatgccaaaagggaaccattttttatttatttagacgctcatactgaacaagtatgtttgctccgtcatgtagtggctgttctcccttcgttagcacttgctaccccatcgtttattgctctcgaacgtttaacattaagcgatttgcgccaccccccgccactgtctgtttgttatacagatagcttgtctgcctatcgccagcaagtcaaaaacaacgttcaccgcaatcgattgttcgtgcacttgcttggaacgtttcaactaaccgatattccgcttactgctggctggcccttgccaactcaacgctatctccaagtttccccgtttctatggcagacatcgtttattcatgcttatttgtgtcatgcttttaatagtgctccacgtacgcttacccaaatcgctatgttattgtcgtcttgtttgcggcagttccgccaccctttcaaaccttactgcaacccgaaaaaagtcacttcccacctagcccgcgaatatctagctttgcttgaagtatttggtttgttgaaaaagatcgctcctgccacttttataaaaagcgatgaggaaatcctttcttgtagcggaaaggaaaaagaacagcattttctccgttgctggcatgaatggttgttagcacaccataagcatgctggtgaagccgaaacgaagcaaggaaaagaggccagcatatagagacaaaaatgcattgaaagaaagtgatgcggttagttgtttaaacaattctttgttaacgagggcggtatcctttaaaacgcggtttcttttttaacggccggaataagcaaaaaagcgcgatgaataatagcggaacggctacccaaattggaaaaaggtgcagcagcccaagaatatacaaataaaaggcaatgaggacgagcgcaatgcgaagcaatagtttccgtttcatttccaatctccacaccctttttacacaaaataggatacggcgataacgatgttttcgtatatgccagaagcgtgtttgtataacatatgcctaggaatggaaactatgtgtggttcattgtacaaacttgttaattaaatttcttgttgcttctgcttgtttttttcagtagaatagaagtgttgcaactcacattctcttcgattaataggaaggctgtctgctttatagcggacagccttttggtgttttggacgaaaaagaaaggaccctgcctaggctggacccttacattaaccatttccaaaaagtcccgtattcataagggacagcttctactttttgctgtaacatgagtgtctttagctttttttctgcttcttcgctactcaaatccaaaaccattgctacttccgcagtggctaaaaaaccatatgtttgcaacaacccctcgagagtcggtggagtcgcttttactggtacgaagccaagcatgtcttccaataactggacataaatcgaaaatggatactggccggaaattttaatgcctgcttcttccgaattgtcattaaagaaaacaaaagtcggaacggtgtcaacgtccatctcgttcgtcgtttgcacgtcacactgaagcgctttggcggcgctcggtgaatgaaggtcggctataaaagcatcaacgtccagtccggcagcattggcgcatgcttttagcacgtcttcattagtaatgttttgtttttgtaaaaacaatgtttctcgcagcttgcgcaaaaagcggtggccagcctttggtccttgtagttctgctgcttttatcgcaagtgaagctttatatggatgaaaatcactaagttttatatccccggcgtaaggcatatttgaggatgatacacctttcacccataccggcggacgtgtatgtttggctttgcctgcttcgcacgcattccacacattcaactttccagcaagcaggacccgtattcggaaataatgaccatattcgactttgagcttctttagaatcggctccatcgaccagcattgagcgcacagcggatcaataaaggtgtaaatctccaatggttttttggcaggcagcgcttcatttgcctcgggagaaatgccgcaaatcccgagttcatggtcacaatggctagtcacgcgatgtttggcgttcatgggccaactcctttcttttatcccggcgttgggtgattaaccatatgatgtgcagtaagcctaagccgatgcatcatataatcacggatgtcgcctgataaatgcacgtcgtccatggcacgctccatacaggaaagccaagcttcagcttggacaggagagatgacaaacggcatatgccgcgctcttagtctcgggtgcccaaactcttctgtatagagcggtggaccgccgaaaaattgcgttaaaaaccgcttttgtttgtatgctgtatgagtcaggtcttcaggaaaaaggtggcgaacgtcttcatgagccgcgatgtagcgataaaaagcatcgacaagttcgcttatcttttcttccccacctaaagcctcaaacgggctttgttcatttcgttgatcaggcacaaatggtctctccttttcgtttgcctagatccattgtagcaaccattgttccgttcagcaaataaagtgtttttagagttaaaaagaggaaatcctttctgtcgatttttcgcaaactttgttataatggaagaagaaaaccgcacggaggggaaatatggaaatttcattttggccgcaggcatacacaagcgaacgggtttcaccacaagcatcgcaaacagatgaaacgacttcattctcgaaaatgctccaatctgaatgggacaaaagcacgcaaataagcactccgccactacagttgccgtttttgttgccgatgttgcagcagccgctgtttttagatgaaaagaatacatatgaagaggttgctactttacaaacgaaagtagaagaagtctacggtacagcagagcaaaaggtggaacaaagcaagggaacagcgccaacaagcaaagctgaatcttatggaccgcttattgaaagcattgctgcggagtttggggtcgacgctaaacttgttaaggcggtaattcaacacgagtcaaacttcaatgaaagagcggtaagctcagtaggagctagtgggctcatgcaattgatgccttctacagctagagcgcttggcgttaaatcgatttttgatcctgctgaaaacatccgtggtggggttaaatacttaaagcaaatgctagaccgttaccatggcaatgaagcattagcgcttgcagcttataacgccggcccaggaaatgtcgataagtacggcggtgttccaccttttaaagaaacacagaattacgttccaaaagtgcttaacacatatcgtagctacgcataaacgtgcagccaaaaaggctgcacgtcaactgtaaaaagattaacaacccttttctatcaggcaatagacgagatgggagttgagcggaccacgggcttctcttctcccatcttttttggggagaggaatggttgctcctccatcttgttctattgtgttgcttgctcgtaaaaacgggcaactttgtttttcgctggtacgaatggcacgtcagcttctgcgagtagttgggtaagaatggattcggcgtgttcaagcgactgtccctcatattcgatttcataatcttccgttcctgcatagacgctatggtctaaacatagcactccccctttataaggcgcctccattctataggtcgttaacgatccaaagtggcgaatggtaggaatcgtcccgatgagttctttaatggcggattgcacttctccttcaggaagcgctccacttaagagcaactgttcatcgcttttggtgagaggctggtgtgtctccaacagtccaccatttgctggcgcttttaaggtaaagacggacgagcctttttttctacggactcgtagagctgcgcctgcactctttaatgtaaagtcagccgtatcatagtaatcgttctgttgtttttctgcttttgtgccaaatttttcggttaactggcgataggcagcttcactaagcattgattttgcttcatactcgatttctttagccatggtcgttccccatttctgcgtttttcgctccttattatacgtagattggcgtccttctgcaaaacgtgggttttcagaacgttttgtgttacactgattacggaaaaagcagctttgggggagaaggatgaaacagtataaagtatcggccatcgaagtggacgaagaagcgagcactgttgaactagaagaggaaatagacgcacaattggcggcgcgattaaaaccaggaaagcgcgtgctcgtcgattctgaccaatatgcttttatttacattcttgaagatgaggaagcgttttacgcgatccgttttgaaaagaatgtttggccagcattaaatgaagcgcacaaattaaaaacgagttattatgtaaagctgaatgaacatactcgtcttgcactcgtcgatatggaggaagagctagtatttcttctagagaacattcgtggtaatgggaattatggagaggcctttgaacaagcagtgaacgacgcattttagtttttttaagaggtggagcttttggactgggatgcttttttaacaccgtataaacaggctgttgaagagttgaaagtgaaatttaaagggacgagggaacaataccagaaaacgtcgctgcatacaccaattgaatttgtaacggggcgtgtgaagccagtatcaagcatattaaacaaagcggcacgcaaacaaattcctctcgaacagctggctgataagatgcaagatttggctggcgttcgcattgtcactcaatttgtcgaggatatagacaaagtcattgagcttatgcgtgcccgctccgattttgaaatcatttccgaacgagactacatacaaaagaagaaaccgagtgggtatcggtcataccacttaatacttcgctaccctgttcagatgattgaaggggaaaagaaagtccttgttgaattgcaaatccgcacactgtcaatgaacttttgggctacgattgaacattcattgcgctataaatatagcggtgaaataccggaagacatcaacatgcgtttgcagcgggctgcagaagctgccttttggctcgatgaggaaatgtcgatcatccgtgatgaagtacaagaagctcagcgaattataaccgcaaaacaacagcaaagccgctgatagcaaggagtgaaacaattttgaagtttacggttgcctcgcgaggggatacactctcagatgaattatgcgatacgataaaaacacgacttcttgctgccgatttggcacatgacagcgataaaccggatatcgtcattacggtgggaggggatggaacgtttttagaggcattccattcttatgcacaccggttagaggaaaccgcttttgtaggcatccacactggccatctcggtttttatgctgactgggttcctgaagaaacagagcatttgattacccatatcatcaagacgccgtttcagattgtcgaataccctttgcttgaagtggtcatccgctatcgtggcggccaaagagagccgaggcgtcatttagccctcaacgaaagtacgattaaaagcaccgaagggtcactcgtttgcacagttgagattaagggagaggcgtttgagacatttcgaggcgatggcttgtgcatgtccacgccttcggggagcacggcttacaataaggcgctagggggagcaatcttgcatccgtctcttgcatcgattcagctatcggaaatggcttcaattaacaaccgcatttatcggacgctcggatcgcctctagtgttgcctcagcatcatacgtgtttgttgaaactgctaaatgatgtgtccgtccaagttaccatcgatcattttaatgtaccggtgtttgcagaaaatgtcgatacgatccaagtccgtgtcgcagaagagaaagttcgtttcgcccgttttcggccatttcctttttggaagcgggtgaaggaggcctttattagtgagtaacccgactttttcatggcgggtcgatgaagacgcgcccctgctattacggacgtttttgcgtgaaaaaaaacaagtgtcgaagcggcttttggcagccgtgaaatttaaaggcgggcttttgcgggtaaacgagatggaagcaacggtgcgccatgtggtgaaaacaggtgatttagtgacaatggtgctaccgcctgaatcgcctagcctaagtttacaacctgaacagcttttatttggcatcccttatgaagacgagcatctgcttgttgccgataaacccggacatatggcgacgattccttctcgagatagaccaggaggttcccttgccaatggagtgctccactattataaacaacagcacctacaggcaacgtttcatgctgtcaaccgtcttgaccgtggcacaagtgggctgctgattgtcgccaagcatcgttatgcccatgatttgctatctcggttgcagcagcaagggggcgtcaagcgttgttataaagcgcttgtaacaggggttctttcagaaaaagcgggcattattaatgcgccaattgacaggaagcctggaagcattattgaacgagaagtggggccaggtggcaaatcagccataacccactacaaggtagaagcagaatcaaagacacacagcttagtgtctttgcagctcgaaacgggcaggacacaccaaatccgcgtccattttgcttacataggccatccacttgtcggcgatgggctatatggagatcatggcgaggcgttggcccaccaagcgctgcattgcgatcgtgtggcattgacgcatccgtttacagacgaagtactttatgtcgaaaaaagcttgccgaaggaatggcgtccattcgttgaggacatgcatcccattcattgaagatgttccgttgtatggcaggaattaagacagcaaacgcgaattttgcatagtaccttgttaggcattatgataaactattagtacctgataataaaatgggagtgataacaattgaaagcaattgatttgtcgaaccgtacatacgtagtgatgggtgtcgcaaataaacgcagtattgcttgggcgattgctcaagcgctagcaggggcaggagcaaacttggtgtttacttacgctggagaaaggttagaaaaaaatgtccgttctcttgctgaaacgctcgaaggggagcatcttgttttaccatgcgatattgcgaacgatgaagagattgacaaaacatttaacgaaattaaagagaaagccggcgtcattcacggacttgcccattgtattgcatttgcaaacaaggaagagctcgaaggcgaatatttaaatgtcacacgtgatggctacttgctcgctcaaaatattagtgcttattcattgaccgctgtagccaaagctgcccgcccgttgatgagcgaagggggaagcattattacaatgacgtacttaggcggggagaaagttgtccgcaattataacgtaatgggtgtagccaaagccgctttggacgccagcgtaaagtatttagcaaacgaccttgggaaagacggcattcgtgtcaatgccatttcggctgggccaatccggacattggcagcaaaaggaattggcggtttcaataatgttcttaaggaaattgaagaacgagcaccattgcggaaaacgacgacccaagaagaagtaggcgatgccgctctattccttgcaagtgatttagcacggggcattaccggagaaattcttcatgtagatagtggctataatattctttcacttgcttaatgttaaaaaagcagcgctcatcatcaatgatgagcgctgctttttttattcgtttttgatttatacataaggcccagcacacattcataatcatgtctattatgggcagaaaggattttgtatcaatgatctcaccatttgaatggttcgtgcttgcttttgcgacttaccgctttacacgtttgctcgtttgggatgatattaccgtatggcttaggcgcccgtttattaaagaaacagagatggtagatgaaaatggagaaaaggtgttgtatttagaaggcaaggggcgagggctgcgcaaatgggtaggaagcctactatcctgttattggtgtaccggtgtctgggttgcgctattcttttatggagggtatgttttttttccacgcgtattttggcctttagccgttcttttttccattgctgctgtggcagcaattttggaaacgatgacaagaaagttggaataatagaggagtgccacataggcaactccccttttttgtgtatagaaaggataaaggaccatacatgaaaaagagcttggcataagatggttttgcattcatcaaaaaatattattctttaagcgtacaataggttgccaatctgttagggctaaactgttttccaattaacgatcctatcctttaatccctttaaaaagaataaagggaggaacggttttttcatctttccattttaggccgtactcgtcttccacacgtcgaatcgtcttattggcaacgttttgtagcgtcggttgttgtgtttcgatttcaataaagccgttgttaacgagccatgtttcatacgttttttctggccaatggtaatcttcaattagcaactgatttccgccccaacgcaattctttttgaatgatatcgccccgtttgtaggttttgcctttttcgccgatacggcatgtggaaaaaacatgacctgtggaattgggattggtatctaacagcacaaatggagcacctggttttaatacacggtatatttcttgcaaaatgttgtttagtactgcttcatccccaatcgtaatgaaaacgaaacatgaaaaagcaccatcaatggagttgtcatctaaaaaagcgagttttgggtctttcactaaacgataatgcacgtttttatggttgtgtttcttggaagcaagctgaatcatttctgccgattggtcgactgcaataatggtcgctgaaaacaactcagcaaagcgtgttgcgattttgcctggcccacagccaaagtcaagaatggtctggcgctcgtctttgtcaaaatgggaaaacacaaattgataccctaatagttgctccaaaatgtcattataggcttcgtacttttccgctacttccttttgaaagaaaaactcagtcatccctctacacctcctagtaaacatagttatatgcttggaattaaaagagtgtgcaatgacagaaggtggaaaccggtaaaaataaaaaaaccaggcttaacaacgcctgatttaataaaacagctatacaagggtgaaagcgatcgcattcaaagcaggaatgccttctggatgttcgtcgccgtatacaaaaccgttcacttgcatcgccacagagcttgttgccgccataggcaattgaatttcaaaattagaaaacataaccgttgataaggcaggaatttccgctgcttttggcttcagccaatactggcccgtttcttttgcttgtgcatcgccgctttcctctaaaaaagaccagccatcgctttcattcatttgagcaacatggtctttaggcgcacgggggcgattgattttcccagtcaaattagccaattccggtttattaaaggcaaggcaaatgataggagtggacagtggcgccgtgcctttattttcgataacaaaatggccctttacaagcactgtttcatcttcttcgaaagtagaaggcgctagaatggaatacgaaaaataagggacgatgatcgcttgcctcgtagaattttgttcatagtcgtttgccccggcaccgctgtttttttcagcttgttgcgccaattcttccagccggtcagtcaatccatcgataattcgcttttgttcaagcaatttcttctcctgctgacgaagcagccgttcatttttgaccgtttcagaacgatagtgcaataatcgctgctttagttgaatatgttctttatgaacgtttgttttctggttaaaagacatagacgcctccttaaaaagtcggacattgaaaacaagtctggtaatacagactacgcggcatctcgttattgtatgtatggctgattcatttgcgacgagaaaatccgagccgtcgtgaaacggctcggtggcaaaaggggagattaggatgcggattttgaatggcttttgcttttcttgccaggaaatagagtagggcattgtggtgggaatttcgtttctttgcaaagaacatcgctaataggaaattccaaccgaggtttgcaatatgccgcttcaatttccagcaaaacgtcagctaatacatggacatctaggcagaaggagaaagaaaggtccagctgcatataagagccgtcaaagataagttcagcatcacattgacctgctgtgacgaaagcgcacacttcagtgccttctggcgcgcataagtagaacgtttcgacttttgtaaattcaaatggctcgcatgacgtacaaatatggttgccagcttcgtcgtataggtctacatcgacggaaaccttaatgagaattttcactttctcaagcgtaacctcttcgccatttggcatgcaaacttctacttgcattctgttatgcggatcagtcacttccttcgtgtaaatctcggactcaatcacccggcagacggcttcacatttcgggaattgtttaataaactctgtaaacgattctgcctcgctgtccctgcatttaaacagttcggacaaatcactgccggatttatttccttcatggtagcatgccgttggcaaatcgacttggcgtgtgacccagtcgaacactttagggacactaatgcatacattatgcttttcgtgatctgtgctcatgcataaacctccttatgatttcctagcgtggttttctctctttgtgcccttaactaggtgttcaggctactgtatagtatgaatggccagtaaaaatgtgcagcctgatataaattattttcgggctcctatccgtaccttctaactacagcaacataagatagtaaatacgataaatagaaagaggaggaaaaagcggatgaatcaaaaaagcaatcagcctcaagcgtttatcaaaagagtaacaaacaaaaagagaccgaaaacggggtacaaaccaaagcctacctgctgcggtggcaagaaaaaaacaaataaacgttcatcttagactaggattaaaaagacttgggcctgtatgttcattcaatataaaaggaaggcatgccatctccacgaggcatgccttcagctgtaaggaagcgcttgcatctttcgtcgtatgtatgaagtgaacaagttgaagtcatatcgtttagcgttactgccgcttccttcatttaaatagaagttccccgtcagcaaaaaaatgcaaaagaaatacgcgtaaataaatgaaatgggcgtgtttagccggtaaatgagctgatttttccgcgtgtatcactcacttaagacgagccaaactcatattgtattagtgtccaataaaaaacgatgaggaggtttatgcatgcaaaatcaatatcaacaattgatagaagtccttgttcgccaagttttaaaaaagcataacgtctctccgacaaaagacttgtcagaagaagaaaaagaaaaaattcgtagcactgcttttggtctgcagcaacaagtggaagagctgttgaaagaaaaacaaacgggaacaaatgaggaagcaaagaatgacaaaggcaatgactcgcaggggaaaagtgatccgtttagtgaaatcctaaaacggaaagcggaaaaacggaaaaaaacagagtaacaagggccttagctgaaattaggctgctgttccagggacatacgcacaggcaaaatagtcggatgagcataatttaaattagattctaaattggagggaaaatcatgagtgaagaatttacacggtttttagataaaccgcgccatcattcatcttcatgcgatagctgctcttgccatagctgttcacatggtggacacgattcacactgtcattctgataaacactgtcattcggacaaaaaagatgaccacaaaaaatggtcggcgttagacccagatgcgtgccatccaatgggttttgacggcgatatcgcacaaggagcaacacaggcaaacaaagatatccaagtttccgaagaactcatctatattaaagattcttgcgatgtagaagtggaatcgaccgacacgaaagcagcgattaatttacaagtagcgattcaagctgccattgcgttgattatccgcatctctttagctggaagcgacaatgccgaagaaatcactcaagaaattcttcaggtctcaaagacgaagcaaatcactcgtcaaaaaacgattgtcgacaattccagaaatgttcaagtgtcaacgacggatacgcaagtggcggtcaacattcaaatccaaatcgcaattctcttggccatcctcgtcgaattggatatcctttaataccatggaaagctgtcaagtttggcagctttttttggtatgttgatttcgcagattggctattgtgccttggcggtcattctttcttcgagcgccctcgatctaaaaggttacgagagaaccagtttggcgacatttcgctagttggttcatgtggagccgcccgatgagctacgtaaaaagtggactcttgtaatttttcttttggagacgggtgttcttcttcttgcacctttacctcagggccggcagcaggggctgcttcttttggtggcggtgggttggtaaatgacttggcttttgcttccgccagctcttctgataatttgtgtttctcgtttagcgcctgctcaagccgttcctgcagttgtttgttctctgcttgcaattggtcgatcatgttgtaatgataatcatttttatatcgtttcagctctatttctaatttagccgcttctgcctgggcatggattaatcgttggtgcagttgggcagctgttagacgcattggagatcgattcactctcatcagtcctttcagcttcataattgcttagtttaaatgtatgaaagcaaaacaaaaacatgaattgaaattggcggtgtttggttggaaagggggaaaagtagcgagtgtgcttgcttgtttttgcatcatctcctactgttatactcctcaatggcaaactcattgaggagtaaacgtcaccgaggtcgtagcatcgatttccggcgttgttacacgaaatggatgcctataaaaggaatgagggaagagcagactcgtcctagttttggctgcggttcatcaagctgcgcacaaatcgggttgggtgggctcgtttgccccgataatgaacaggggccgagatcgccaattcctttttcgcacgcgtcatcgccacatacatcagtcgtctttcctcttgcaaggggccatcatcgccttctcgccaagcgtcaagcgcatagtcatgggggaggctgccctcgactgctcctacgataaagacatggctaaattcaagcccttttgaacgatggatcgtcaataattgaatgctttttgggtggcgagtttggaacgtttggcattcctgttgtttggcgattacatggtcgatatgggtcaaaaacgattcgactgtttcaaattgtgtcgctgcgactttaagttgattaaaatcgtcgctgcctttttcgaatttattcccttcctgaccttgttttttgatcgtttcattcaatcctaaacgtgcttcggcaaaagcaagcgcttcggatggattcatcttttgcatgcggcggcaatcagcaggcaacgtttttagtttttttgcttgaaaggcgggcaactctgttaaaaaagggatggcttcaagaaggctgcaccgttctgttttctggatgtgtaacaactgatcgagatgctcttgctttataaataaagctttcagcagttctgccatcacatatggactttcttcgttcttgccaatccgcaaaaaggagagcgcacggcgtacaaatggccgttcataaaaacaggcaaatccttgttcgagcgagaatgggagcgtcgtatcaaccaaacggtccacgagggctctcacgcttgtagacgtgcggtaaagcacggcgatttcgcttggacaaatgccctttccaattagcctcttgatttcttccacaatcatggttgcttcctcttcctcgttgtaggggaagaacaaataaggcaattgatcggatgtgtgctgagcaacgagcgttttttctagtctcgtccgattttctgcaatcactcgattggcactggcaataatcgggtgtgatgaacgataattttcgactaaatgaatcgttttcgcttctggatagtgagcggtaaaactgcgaataaaacgagggtcgctccccctaaaccgataaatcgattggtcatcatcgccgacaacgcatatattgcgctgaggcatcgctaacaatttgacaatttcaaattgcacagggttaatgtcttgaaattcatcgattaacaagtaggcaaaacgttcttggtagcgctgcaagaggcggttgttttcctggagcacatataggcagccgagctgcatatcgtcgaaatcaaaacgccctgtttcccgcaaggctttctcataatgttcgtaaaggagggctgctttttcttcaaacgtatctgttgtctcaacatgtttaggagcgatcatatggtttttccaccagctaatttgtgttgctgcttgatcataaggaaactcgctctcatctaaacctagcgctctgccttgtgtttttaacagttcttgccctgattttattaattttgacccatgccatttactgggatcagcatggacaagcattgtatagaataaactgtggaatgtgcgaatcagcaatgactgggcgaacgttggttcaatccctgggtattcagtcattcgttcccgcatttcttgtgcggcttttgcggtaaacgtaacgagcgccatcttgttgggatgaatgtttgcttcgcttatcatataggctgcccgtgctgtgaggacgcgtgtttttccacaacctgcgccagctaaaaggagcagcggcccatcgatatgcttgacagctttccattgcgcatcgtcgagtgtaaggccggcttttgtcagttgttcgcggtagccttccatggccatttgtttagcagaggctggcaccgtaaacggagcaacgtttgacaagacaagaggcgctttccattctggggtggtttttaaaaccgcctttctttgaggcaaacgaaacccatgtacggttgtagcagctgtttgagattctgcttgccttgcttgttcaaaagcttctacttgctccctgcaacggttgtcgccgctagggggatggataaatgagggcatttggtgaatcgagaaggacatagataaaggggcgccacagtgtatgcaatggagcaacccttttttactaagccggtaaaatgtatgccattccccccgatcaagttctggcaaatacaaaggttcgtttaaataaagtgccgtgttcatactaactcctttcgggtgcaatcgttatcgtatcaaaaggaacagcaaccacgcaataaaagctcataacaaaatcctatataaaaaaacaaaaaagatgcagggaattgctaatagatagcgaaaaaactagaaaactgtaaaggaggttacaaatggctgacattgaagcaaaaagcacggccatcctttatgaagcttttcagtctgaagcgagcgacattcattttctccccacttcaaaagggtacctagttcattaccgggcacttggtgaaattcatgctggggaaacgttaaaggctgaggatggcttcagaatcgtaagctattttaagtacgcttgcggaatggatattggcgaacgaagaaaaccacaaagcaaagcgatctcctacgattggcaaggcaatggttacacacttcgcttctcgacattgcctgctaaaccaagtgaaagtttggctatacgcatttccccacgcacgactccttatacactccaatctctttccttatttgcttctgatacgcgaaagttcacggagcttgcccattgccagaacggtcttgtcctctttacaggggcgacagggtcgggcaaaacaacgagtgtttatgcattgcttgattacgtgcagcaatcgagcacgaaaatgattgtaacaattgaagacccgattgaaaggccgattgacggcatggttcaaattgaaacaaatgaaaaagcgggcatcacttttgcaacagctttaaaagcggtgttgcgccacgatcctgatgtgattgtcattggggaaattcgtgatcgcaacacagcggaacttgctttgcaagcagcgacaacaggccatctagtaattgccagtttacacgctgcgagtgcttctcttgcctttgcccgtctagcggagttaggcgtgaatgtacgcgttgaatgcgtccgggcagtcattcaccaaaaattagcgaaagtcgtaagcaaaaacaaacgtgtggcattttttgaatggttgctaaaggattcgctcttaaaaggagctgattctaatgacaagtcaggtgaaatagaagcgcttagagcggttcgcaaggcgtgggccattggagcgattgaccggcactcatataacttgctaacagacaaagggatgacggaggtgggcagtgggtaccgttagggaaaagcaaaaagtggaacaagtgcaatttttgaagcgtctcggtgaattgttgaataaagggtacgaaatggaccaagcattgtcgttcttggctgtccacgcctcaagagagttgcaggggaaaattacaggtttaaaaaaagatttaagagaagggaagacattgtggcaaagcatcgagccattctccctacctggagaagcacaatcatttgtctatttctatgaagagcaaggtgagctttcagaagggcttgtgtctgctgctcagttggctgaaaaaagagcttatacaaaaaaacagctgcaaaagctactgcgttaccccatttttttactttggggcgctgcggttgttctgatcgtattaaaccaatttgttgttccacactttaaatcattgtatgcgacaatggaatcatcgcctccatggctaacgcagttctttttccagttccttacttatatcccctatatgctcattggacttgctatggttgggtttatagcaagtatgctcatatggaagcagtacaaaaaacgctctccacacgaccaaatagcggtctttctaaaaataaagccaataaaagcaacagtccaacaagcgatttcctattatttctctttgcaactaggaaggctcctcgaaacgggaatgtcgttgcaacaagcgctaaacgtatttgaaggacaagattatttgcgtttttttaaagaagaagcacggtggatgaacaatgagttagaaagaggggagtcatttattgcttacattaaggaaaagccttattatctagatgaactagctgctattgtcgagaatggtatgcgtaccggcacaatagctagtgatttgcagcaatacagtgaatggctttatcaagaaatggatgatcgcttgcaaaaaggcgttgtttggttgcagcctgtgttgcttttagcaattggtgcgtttgtatttggtctgtttttagtagtcatgttgccgatgtttgaaatgatcggttcgcttgagtaagacttgaccaatccctatcagaatcggtaatatagaaaaagaacgagcacaaaaatgagttggaaaaactttttttaaaaaagtccttgcgcaatgtctgctcctatggtatattattaaatgtcgctgaggtgatagacaagcggcattacataatctttcattttcggggccttagctcagctgggagagcgcctgctttgcacgcaggaggtcagcggttcgatcccgctaggctccacttttacggaggaatacccaagtccggctgaagggatcggtcttgaaaaccgacaggcgggttacaccgcgcgggggttcgaatccctcttcctccgccattcttttgatttattcttaacgacgcggggtggagcaacgaacgaagtgagttgtctcgacgcaccaaacatccctgaatgagcaagcagaggaagagacagttatcctctttcaaacaatagcacagcaaatctcatattcattagtagcgacgcggggtggagcagtctggtagctcgtcgggctcataacccgaaggtcggcggttcaaatccgtcccccgcaaccaaataatgggctatagccaagcggtaaggcaacggattttgattccgtgattccctggttcgaatccaggtagcccagccatatgcggaagtagttcagtggtagaacatcaccttgccaaggtgggggtcgcgggttcgaatcccgtcttccgctttttttattgcaaaatcaatgataggcgggtgtagtttagtggtaaaacctcagccacgagcgaaacatccgtgagtaatctccgagttgcctcgacgcattcacatcgcttgaataagcgagcagaggaagaggcatgttgttcgatgcttcaaaaatgagggcaatagttattaatatatgcgggtgtagtttagtggtaaaacctcagccacgagcgaaacatccgtgagtaatctccgagttgcctcgacgcattcacatcgcttgaataagcgagcagaggaagaggcatgttgttcggtgctccaaaaatgaggacagtagttattaatatatgcgggtgtagtttagtggtaaaacctcagccttccaagctgatgatgtgagttcgattctcatcacccgcttttcctgtttagtaagggcctgtagctcagctggttagagcgcacgcctgataagcgtgaggtcggtggttcaagtccactcaggcccatcaccttacggaaataggttgggcgctttgaataggagaagtacccaagtggctgaaggggctcccctgctaagggagtaggtcgcgtaagcggcgcgagggttcaaatccctccttctccgccatttatgctacaactgagctttggtatgcgggtgtggcggaattggcagacgcgctagaatcaggctctagtgtcctaacggacgtgggggttcaagtcccttcacccgcatttcaaaaactctttaagcaacggcttaaggagtttttttgtgtttggtatgttggcactcagggacgggatcaacgccacctggatgaaaaggatggcattttaaaattcgttttatggcaaggtagctccctttaatggccccgtgtgtttcgattgcttcaattccataggcagagcaagttggatagaagcggcaggatggcggggtaagcggtgaaataaaccgttggtaaagacggatgatttgaatgaggagcttgcgcatttgtaacttcctttcattctatatgcttaaagtatagcaaaaaatagcgggcagaaacagctattggcaatggacaaaaatttagtcgttttgtgatgcaggattttcgcttgctgtgtctaattgtatcgataaccggaagcgaaaggaggggcgcgtttattggtaaattcctaatagaaaggtgtgagtgaggataaaacgacttaaagatgaaaaagggtttacgttgattgaaatgcttgttgtgttgatgattatatctgttctccttttaattgccttgccgaatatgacaaaaaatacagacttggctggcgacaaaagttgtgatgctacacgaaaactcgttcagacacaagtgtccgcttatgaagttgaacatgggcaattgcctcgctcccttgatactcttgttcaagaagggtatgttgaccaagtaacttgtgcttcaggaaaaacactccgcttagatggaaaaaatgttatcatcgtttcgggctgatgatggctttacgtttattgaattactcctcacgatcttgcttctgtctgtattgcttctccttcctattgtttatatttccgaaaacgaaccgattaatgaagaaaaagcagctattgccaaactccgggaagaccttgttcttgctcagcatattgcgatgacagaaggaaaaaaggtaacggtatcctttgaagaagaccggttagtggtgtttgctgagaaaaaagagcatagcacgttccgttatccacttgtactcgaaatggaaacggtgactatgtctattaacgatgttgtttttttggaaaacggccatccgcaaagatccggttcttggaatgtagcgacttcacatgttacagctaggttcagccttcagatcggaaaggggcgtgtgtcttatcgggaattgtaagggctttgtgttaatggaagcgttaattggcttaggcttattggctttggccactgcgtttctggtgcccctttacgcgtgggtctatgacgcgcgaaacaaattagctgatgagatgacgatgcttgttgctcttgaggaaaagcgccatcattactatttccaacagggcagccaagactggcaaggtacggcctatgacaatattttgatgtattgcgaggaaagtgtggtgaaggcaaacagccagctttgtgtatacacgcttaaaaaatgagggcggttttacattaatcgagcatataattggcttgcttgtgctatcagttgttgtattttgcttgccgtcgctattgcagctagccggttacagcgatcctggtgaaccgtttgacgcacagccttttttaaaccatgtaactaaagaagcaaaagaagctgaactcatcacttggaaggacgacgccttgttgatttataaggatgggtcagctgttagttatgagtggcggccacaaaaacggatccaacgttttcgagacggcaagggggtggtcataatggcagaagcagttgaacggtttggctgcgagaaagctggttatggcttaagctgttcgattacttttgaaaatgggaaaacgactacacgttcgttttggacggcaaaggatgtggctttcaattttcataaaaaatgaacgaggcgctattttgccgctgacattgttgacattccttgtactgggcggctatttttcttatcaattgttccattatgaacgggagcgcctcttttatgaacaacagctccaattgcttgaattggaaaatgccctgcaattggcggttttggatattctggcaagcgagggagatgaaactgaagacaaacactatccaatggggacggtgtcgattgtgcagcaggctaaggaggacaagagcgtttatgagcttgaagcaactttgaagaatggtgctacaagaaaagcgcgtttggctgtcaatgccgattgggaaatggtttcatatgaagaagggctgtaattttgtctgaatggcgaacaaactggttacactaaacagtgaggtgaagcaaatgacattccaggatttgttgaagtttgcgacacaggaagcggtgaagcgaatggaaaaaccaaaagctatacggcaagaggagcgcagcaaacgaaaggcggaaaaacaaccactttctaattgggcatttggcgtgttgccgatggctgtttcaatcaccaggcgtcgattgaaagaaggaaggcgcagttagcgtttaaggtgtcgataatatcactcagactgatagaaagcgcttgtcagctgagatgccaaacggagtgaagatgcgaatagaacaggaagtcaggagcagtggttatcttgcgcatggaacgccagtctcaaagcatctgagcgaagggagcattgaaggatgcaagcgtttgtctacagtctgaggctttagcgtgtgcttccttttaagaaagcatttacaaaaaatcggcttagcgtatataatgaaagagatgatcgcttaaagaaggagggcaaagagcatggatcgcatgtttcgggttttaggattttggacgggcatatttgcggtattattttatattgggcatatgaatgaaatggctttgctgttttttgcgcaaaccgtcattttgattgcgctaggctacctagggctgtctgagagggtatatgtttatatttttgctggctattgcacgttattttttgttggcttcacgtattattccgtgtttatccttgttccaagtttcggacattaacctacatatgcaaaaacagctgctttacatggtaaagcagctgttttaatagccgttcagaaacggattgtggtccatttcttggcctatcgttgtcaacggcccatgtccagaagcgacgatggtttcttctgggagtgttagcagtttgttgtgtatgctttgcactaataattcgtggttgccgccgaaaaggtcggttcggccaattccttgttgaaagagggcatcgccagaaaagacaatgttttcatcggcaacatagtaagatacgctcccaggagaatggccaggcgtatgaaaaagcttgaaagaaaaagaaccgactttcagcgtgccttcatccttgagcaagtgatctgcaggctttgttttaatcggctgtcttcccattcgagctgaaccatttttcaaagggtctaacagccattgtttttctgcttcatgaagatagacaggacaggcaaatgcttgtctgacttcttctagtgcgccaatgtggtcaaaatgggcatgtgtaagcaaaatcgcctgtggtgttaatttttgttcgcgtatccagttgacaaatgcagctccgtcgccgcctgggtcaaacagtacagcctctttttcctcgttgtagaggacataggcatttgtttgtaaagggccaagggggatttgtgtatacatgtctgcctcctaatggtttctttatgttctacgatacatcgtaaaaacgtgattctgcaaggaaggcgactcgacaaatggcatgaaaacgggtacaataaaaacgaccatacatactagtaaaatggaggctttcgctatggttttagccatcttgtttctcttaatcgccattctgtctgtctttggcggaattgtgagcgtaaaaaggaaaaatttctttgctgctggctttagtggcgtggctgttatcgtatttggatttttttcaattgcaacattgtacgcgattatttttcaaggcaccggcgtacctctcgaataagaacgtacaaaacagaagcccatttccgtcctattcggtaatgggcttctagcatgtatatgattaatggaacatttgctgatgtaaataaaagatgccgccattgacgagagaaactttgattctcggctcatataattcttttaacgcttgtttttcagcgacatagctttctggtttgtcttcttcttgctcataaaaagcttcaagcaatgcatcatcgctttcccaccgctccattgccgatttcgcccaatcctttggttcttgctcagcaaacgtacgaatcattttttgcaggcgcttcattcccgactcgacccgaatcattggtgataatgtaaaacaataatctgggatttttggtgtgagtgttagagactcaagcctttcaaaaaactgtggcacaatttgtccatggatgaggtttaagccaagcgaaagcaaaacatcttttttgcggtcgcattgaaacgctacgttggcattcatgcaaagccacggatgtaaagggtgtgagctttgtcctacaggctgtttttgttcatacatacggacgaatgcgccaagtttcttggctgattggaaaatttgtgctaaccggactgaaccaaaatgaaccggttcgcctttaatgccttctggacagcggttgttgtccgtaatgagtgttaacgtcatcggatttggcacaccaccagtcttttctaaataatgccagtaaaaagggcggttcatcagctctttatccagttcaaccgagagctggactttcaggtgacttggcgattcttctagaatgggactgccatttgcaagaaagtaacggcgcaagtattgatggatatcaggcggtctcatggccatcgtcctcctttcctttttcagcgcggagttcttcttgtgcgtccgtcataatcgcagctaagtgatcaaatttaattttcatttcaccatctgaagtagactgggccatgacggattgcacatactcttctatttcaggtagatcaattcttgctagaatgtcatctaattcaccgatcacagactcaaacaaatggattttctcgtaaagcagctcaagaatatgttgctcaactgtatgttggacagcaaaattatagatgcggacatcatgctcttgaccgaggcgatgcaaacggccaattcgctgttcgacacgcataggattccaaggcaagtcatagttgataatatggtggcaaaattgaaggttgattccttctcctcctgcctcagtggcgatcagcacttgtgcatgtttttggaatagctcccgcatccaatcttttttgccgcgtttgaacccaccgcgaaagggcacgcttgtaatgccatgttgttttaaaaaccattgcaagtacagttgggtggcgcggtattcggtgaaaatgatgactttgtcatcaattttttgaatcaattcgagtgctttttcggccttggcgtggccatcaactgcagtcgcttcgttgagcaattcgacaatcgcccctgtctctttttcctcttgttcgtatttatcaatcatgtttttcagcgtaacaaagaccgcttcgcggctagaacataattctcgctttaacgtaagcaacgtaaaatggttgatcgtgccgtgtaacgattcaagcttttcataaaagtttcgttcactttggctaaatgtaatcggcactgtattaacgactcgtttggtccattcaatccctgtttcctcacgacggttgcgaaccattactttttgcatgagggcacggagctgttcatcattttttgcggaacggttattggctcggtattgctgtttaaagctctcgatattgccaaggtggccgggctttaataaagacactaaattaaaaatttcctccagcttgttttgtacaggcgttgctgttaacagcaggcaaaacttctttttcaacaaacggataaactcgtagttttttgttttcgggttttttagtttatgggcttcatcgataatgaccatatcgtatggctgggcgagcacaatctcacggtgtggctggcgttttgctgtgtcaatcgaggcgacgaccacgtcgcattgctcccacacatatgcttttttttgcggaatcgcaggaatgtaaaatttgctgtttagctcgatcgcccattgtgacacgagtgatgctggcactaaaataagcgcttttttgactaggccgcgaatcatatactcttttaaaattagacccgcttcaattgttttgcctagtccaacttcgtctgcgagaatcgctttgccattcattttttcgatcacggtttgcgcggcttcaagctggtgctcgtaaggttgtaaagccggcaaataacggggcgcaagcaatccttgaaagtcggggatttgctcgtgttgttctgcttcatatgcgagtttgaacgtttcaaagttagaccatggcccgtcgtcggccaaacgttgtaagaaccgaacattccaactatcatcaaagttaatgttaatatccaagtcggtcacatcctttatttcttggaaattgccgccgcatttttcaaaaaatctgttgcgaaacggacgatcggttgttaggataagaagtgaacatgtcgtctgtttagtatgtacatattccaatcatttgattcggcaaacgcaactgaataaagcggatgatggtaaagggagagactgggcatttacgcccagcgccgaaggagcaagcattttgcgaatctctcaggcaaagaagacttttacttgacgcatctctggagagcgctttttataagccacctacgaagacaattcggcttttggccgagggaaactttctggttcaaggacagggcatacacagcttgtgtttgccgtgtccttttttcgtctattgaggggacttatatgactcaatggcatggtttaaaaatcgaggagggttctttatggagactaagctgttacgaacaccgctttatgaactttacgatcaggcaggagcgaaaacggttgactttggcggctgggaattgcccgtttccttttcaggaattaaaaaagagcatcacgccgttcgaaacgctgctgggctttttgatgtttcccatatgggcgaattgcttgtggaagggcccgatgcgttaaacagtttgcaagcactagtaacgaacgacttgtcgaaattgcaagataaccaagcccaatacaatgcaatgtgtacggaatcaggggggacggttgatgatttaattgtttaccgccgcaatgaaaatgcgtatttgcttgtgctcaatgcggccaacattcaatcagatattgaatggattcgcgcccatgtatcggggcaagtgactcttaccgacatttcaaatgaaacagctttgctagctgtccaaggtccaaaagcattagcggttttgcagacgttgacggatgagcctctgtctgagattcgcccgttccgctttaaagaaaacgttatgttcgcagcgatccctgtattagcttccaggacaggctacacaggcgaagatggcttcgagctttatgtaaaagcaggcgatgcggctgaactttggcgggcgattttagcagcgggcgaaccgtttggccttctgccatgtgggttaggagcccgtgatacgttgcgttttgaagcgcggttgccattatacgggcaggagctgacaaaagacattagccccattgaagctggcatcggtttcgcagttaagactgataaacaggctgcttttattggccaacaagcgcttaaaaagcaaaaagaacaagggccgagccgcatgctagtcggaattgaaatggtggatcggggaattccaaggactgggtaccgtgtcttttatcaagggcaggacgtcggctttgtcacgagcggcacgcaatcgccaacgcttggcaaaaatgtcggtctcgtacttgccaaagctgatgcggcagctattgacacggaacttgaagtagaagtacgaggcaaacgcctccgtgctcgagtcgtaaaaacgccgttttacaagcgtacgaaataggaggggtaactgtgaatacacaccgctatttgccgatgacagaggaagataaaaaagaaatgcttgctacaatcggcgttgattcgattgaggcgttgtttgccgatattccagagtcgacccgttttaaaggccaacttgctatagaggcagcgttgaaagagccagaattaatcgctcattttcaaaagcttgctgatgaaaaccaatcgattaaaacgtacacgtcctttttaggggcaggcgtttacgagcattatatcccgtcgattgttgaccatgtgatttctaggtctgaattttatacagcttatacaccgtatcaaccggaaatttcccaaggtgagttgcaagccatttttgaatttcaaacaatgatttgcgaactaactggcatggatattgccaactcttctatgtatgatgggcctactgcacttgctgaagcagcgatgttatcgtgtgggcatacaaaaaagaagacgattcttgtttcaaaagctgtccatccagaggcacgggcggttttgaaaacgaatgcgtacgggcaacgtttgaatgtcattgaaattgacgctaatgcgaatgtgactgatatcgagtcattaaaggcggcttacaatgaagaggttgcttgtgtcattgtccaacaccctaacttttatggcagccttgaacctcttgctgaaatcgaggaaattgtccatcaaggcaaagctcaatttgttgtttccagcaacccgcttgcccttggtgtcttaaagcctcctggcgactttggggcggacattgtcgttggcgatgcacaaccgtttgggattccggttcaatttggcggacctcattgcggctattttgcgacaacgaaaaaattaatgcgtaaaatccctggaaggctcgtagggcaaaccgtcgacgaagaagggcggagaggttttgttctgacgttacaagcccgtgaacagcatattcgccgtgagaaagcaacctctaatatttgctcgaaccaggcgcttaatgcattggctgcatctgtggcgatgactgcccttggcaagcaaggtgtgaaagaaatggcaaaacaaaatgtccaaaaaagcgcttatttaaaaaagcagcttagtcttgcaggcgttgacgtagtaggcgacgggcccacatttaatgaatttgtcatcaactgcggccagcctgtcaaagacgtaaatcgccaattgctggaaaaaggcatgatcggtggttttgatctcggcagtgtcgagccagaacggaacgggcaaatgctcgtttgcgtgacagaactgcgcacaaaagaagagttggatctcttcgcgaacgaaatgggggcgctcgtatgacacaagcaaaagatgttgcattgatttttgaattaagcaaacaaggacgcgttggccatagtttgcctaacttggatattgaagagcagccgcttgaatcgctgctccctgaagcatatgtacgtgaggaagagcctgagctgcctgaagtgtctgagttgcaaattatgcgccattacaccgctttatcaaaacggaaccatggcgttgactctggtttttacccacttggttcgtgcaccatgaagtacaatccgaaaatcaatgaagacattgcccgtttgcctggtttggtgcatgtccatccttaccagccggaggagcaagtacaaggatcgctgaagatgctctattcgttgcaaaccgcacttgcggaaattacaggcatggatgaagtgacattgcaaccagctgcaggagctcatggtgaatggacagggttaatgatgatccgcgcttatcatgaggcgaatggcgataagaagcgtacgaaagtggtcgttcctgattcggcccatgggacgaacccagcctcggcgactgttgctggctttgaatcagtgacagtacgtaccaatgaagcagggcttgtcgatttagaccatttacgtgaagtggtcaacgaggaaacggctgcccttatgctgaccaatccgaatacgcttggcttgtttgaagcagacatacaggaaatggctgatatcattcatcgtgcaggaggaaagctgtactatgatggagccaactccaatgcgatactgggcatcgctagaccaggggatatgggttttgatgtagtccacttaaatttgcataagacgtttacaggcccacatgggggcggcggtccaggctcaggaccagtgggcgtcaaaaaagagttggttccctttttgcctaagccagtgttagtcaacgatgacggctttttccgctttgattctgatcggccacaatcgattggccgtgtaaaaccgtattacgggaattatggcattaacttgcgcgcctacacgtatattcgcacaatgggtccagacggattgcggcaagtctctgaaaacgctgtgttaaatgccaattatatgatgcgccggctagagtcctattatgatttgccgtatgcacagcattgtaaacatgaatttgttctatcgggcaaacgccagaagaaacttggcgtacggacgcttgatatagcgaagcggcttcttgattttggctatcatccgcctactatctattttccgcttaacgtcgaagaatgtatgatgattgagccaactgaaacggaatcaaaagagacgctggatgagtttattgaagcgatgattcaaattgccaaagaagcagaggaatcgccagaacttgtccaagaagcgccacaccatacggtcattaagcgcttagacgaaacacttgcagcgcgcaaaccgattttgcgctatgaaatgaaaaaagaaacagtttaaaatgagaaagcagccgaggcgcaaggggcctggctgcttttttcaaaacaagtggttcattatttctttttgactttgcctgtccagttgcggaagccgccttttaaataagaaatgtcttggacgccccgctttttccgcagcaattttgccgcttgtttgcttcgtgtgcctgattggcaatacagatagacgggctggtcttggcggatttcgcttaaccgctgccgcatttgtgagagcggaatattgcgcgctcctaaaatatggcccccctcatattcccgtgtttcccgcacgtcaattagctgtgctttgcggtagcctttaataaattcgtcttggctcaatgtcttcaaatacttcggtttgtaaaaacgagatgcaataaaaacgatgagcacaactgtgaggacaataagaatgattgtttgtgcatccataatatgaggctagattctccttttgcaatatcgactatcattattataagcgtgggtctcctttttttcaataattgtagcaggcaggagaagtggcttttatgcttacggagaattccttagtttggtaaactaatagaggaatgtagcagacactaggaaaaggaagcgattttatgagtgaagtatggcgctttattgattcaaaaaaacaagggcctgcttataatatggccctagacgaggcgttgttgaattggcacagcgaaggaaaaatccccccgactattcgtttttatggctgggaacctgcgacgttgtcaattggttattttcagcgtgtcgccaaagaaattcgaatggaagctgttagagaaaaacagctcggctttgtgcgccgccctacaggagggcgcggcgtgttgcatgaacatgagttaacctatagcgtgattgtgtcagaagcccatccagctatgccaaagacagttaccgaagcataccgcgtcatttccacagggttgcttgaaggatttaaagcattgggcctcaatgcttattttgctgttcctgatagcgaaaaagagcgtgaagcattaaaaaagccaaggtctgccgtttgttttgacgccccgtcctattatgaattagtcgtggaagggaaaaaaatcgccgggagtgcgcaaacgcggcaaaaaggcgtgatattacagcatggttcgattctactagatatcgacgaagagaaattgtttgatttattccagtatcgaagcgaccggttgagggagaggatgcaacgcgctttttcgcaaaaagccgttgcgattaacgcccttagaaaggaacctgtcacattagacgaggcaagccgagcgtttaaacaagggttcgagaaaggcctaggcattcaattggtcccttatcagttaagtgaatcggaagaaaaggaggtccaattgttagcgaaaagccgttatgagagcgatgaatggaatttccgccgttaattcgctacttgaatggctgaatcgcgctatgctaagataaacgttgactctttttgaaagccctgtggaaaggacgtgttgctttgcaatacgaaaaagaacgcgccgcttatatacatgcatttatcaggacaaaacaagcgatgctccgtgaacaattggaaggcgtagcgggcgatgaaatggaattgaaggaaacgttttgggatcatgtcaccgtcaacttttccaatagccacgagattcaagaaacgatttccagcattaaacaacaagccgaacttttacatgaacgggaacgtagtggcgcactaattaaaaaacaaatgcggacgttgcgacggttagctgattctccctactttggccgaatagatttaaagatcgaaggcgaagatcaggcggaaccgatttacattggcctcgcctcgctaatggatgaaaacgatagcgattttctcatttatgactggcgtgccccgatttctagcgtctattatgactcagaaattggccctgttacctatacggcgccagcgggtacggtcaaaggggtgttagagaacaagcggcaatatgtgtttcgccgtggcgagttaaaagccatgtttgatacatcgcttgcgattggtgacgaacgtttaaaggaatctcttagcgaaggcgcttcccgttatatgaaaacgattgtttccacgattcaaaaagaacaaaaccaagccatacgtgatgaaaaaagccggtatttggttatacaaggagtagcaggcagcggaaaaacgtctgtggcgatgcagcgtgctgcttatttgctttttcgccatcgttctcacatcgaagcaaaccaacttgttttgttttcgccgaatgagttgttttccagttatgtgtcgactgttcttcctgagttaggcgaagaaaatatgaagcaattgacgtttcgtggttacctttataagcgacttgggcgtgtgtatgaagtagaagacggatttgcccagcttgaatatatactaggcgcagctaaaggcgagttgtaccgaacgcgaatgagaagcattgctgtaaaatcaggacgtgcatttaaagaaaaactggatgctttcattgaaaagctgaaagaagggggactattctttaaagacatccgttttcgcaaaaagacactgataccaaaagaagatattgaaacgtatttttattgcttggaccatggcattcctttgcaaaatcggcttaggctcactggggaatggttgctaaaagagatcgccaaacaagaagggaaagaacgttctgaagcatgggtcgaaaaagcccgtgagctgttagacaatgaaacactgctgcgaacgcactgggaagtagaaaaggcaactgcaaacgaagaggggttcggtacccaggaaagacaagaacaactcattgctaaacaactggtgcgcgaggcgtttgagcctttgaaaaagcggataaaagcgctggcttttatcgatagtgaaaagctatacgaacaatttttgtttgatgattgccatcgggatacggaggggtttgctgctgttgccttatggtctagcagtgaaattagtaaaaagcggatgccttatgaagatgcaacgccttttctctatttacaggaccgtattaaagggttacaagtagaccggtccattaaacacgtcttcattgatgaagcacaggattacactcattttcagctcgtctatatgcaaatgctctatccagccgcccattttacaattgtcggcgacgtcagccagacgctttatttccacggaccaaaccaaacaggcttaatcggtggcgacgaggctgatgtcaaatacatggcgttctataaaagctaccgttctactgaagccattattcgttttgctcgggagatgctgccgaatccagaggagattatcccgtttgaacggccaggtgatgtgcctgttttagtgaagggaacaagccgccaagctttaataaagcctgttaaagaatgggtggaacaaatgggagagagaggctacaggacggttgccgtaatcgtcaaaacggcgaaagaagcaaacgatgtccatgcccaactgagcgaatggctcgacattcagcttgtggccaaagaccatcatgaatacaaagaaggagcagtcgttttgcctgtttacttggcgaaaggaattgaatttgatgcagtcggcgtatttgatgcgtctgcaagccattatgcttcttcccaagaacggtaccacctttacacagcatgcacacgggcgatggaccacttaaccgtttttgccgcaggcgaatggtcgccatggctgaagccgatcccgtcccatctttatgaagaaaaacaagcgctctcctaacggaagcgcttgtttcagcctgtagacaaacgctcgcatacttcgtcatttgtctcggtcatatgttcatgaacacttgttctattcacatcttccctcgcctgcattcctcgtctgacaagcgttttctatcagctgacggtttgtcgacatagtcgacaaacccaaacaagcgctctcctaaacggaagcgcttgtttgggtgtgaatatgctctgcaagtgcttgttgcagctttcttgttacagggccgacggacagtgtagcgactacatcgcctttaaacgtatggacaggcgtaatttcaatcgatgtgctagtaatgaacgcttcttccgcatgagcaagcacttcttttggaaacggctcttccacaacatcgatccccatgttcttggcaatcgagatgatttcttggcgtgtaatgccatttaaaattagattgtttgccgggtgtgtgtataaagtctcattgttaacaagaaataagttagatgaagacccttctgtgaccgcctcatcacggtaaagcactgcctctgcacaatcgtggtcgcttgctttccgtttggcgaggacattgcctagcaaattgatggtttttatgtcacagcggagccaacggatatcaggcgttacataaacggaaacgcctttttcctgacttgcttgcatcggcttatcagggagtgcaaagccagttaaaacaggcgtttcttcacgggtatacaaatggttgcgagcgcctgcgccccttgtaaattggacgtaaacagagccattttcaattttttcggtgttcttgtaatcgtttaggcgggctgccaacgtttctttttgataagggatgcgcatgtcgagtttttctgcgctggcatacaaccggtctaaatgagcatcgagcgcaaaataacttccttcataaatgcgtataacttcataaatgccatcaccgaaatggtacccgcggtcattgtatgaaacatgggcctctgtttcagggacgatggagtcattcacgataatatgattcatttttagccctcgtttcctatattttcttcttgatgtctcttctattttccaaaaagaacgcttgtttgtcaatgggagtaatgaaattcacccgagatacacattctataggaaaataaaaaggagcgttttgatgaggccattttatccccaacttgtgtactttgaaccacaagcacttaattatccacttggtaaggaattatacgagaagtttaaaaacgcagatgtcgaaattcgggagacaacgtcacacaaccaggtacgaaacattcccgggaaaaatgaaaatcaacaataccgaaatgccaaatcgacactcgtagtgggtgtccgaaaaacattaaaattcgacacatccaagccatcggcagagtatgccattccattggcaacagggtgtatggggcattgccactattgttatttgcaaacaacgcttggagataaaccgtacatccgaacatatgtaaacctcgatgatattttttcggcagctgatgattatatgaaagagcgtgcgccagaaatcacccgttttgaagcggcgtgcacatccgatattgtcggcatcgatcatttaacacattcattaaagaaaacaattgaatttattggtgagcgtgaacatggccggcttcgctttgtcacgaagtaccaccatgtcgatcacctcctcgatgccaaacataacggccacacgcgtttccgttttagtgtcaatgctgcacatgttattaagtattttgaaccaggaacgtccaattttttagaacggattgaagctgctgaaaaagtcgctaaagcggactatccactcggctttgtcatcgcaccgattatttggcatgaaggctgggaagaaggttatctggaattgtttgaacgcttagaggccagtttgccttcctatgcaaagaaagatttgacatttgaaatgattcagcaccgtttcacacaaacggcgaaacgggtcataaacaaacgttatccgaaatcaaagctggaaatggaggagaaggagcggaaatacaaatggggccggtatggacgtggaaagtatgtttacaaagatgaacgggcggccgagttgcgagacactcttactggctatattgacaagtactttccacgtgcaaaaatcgagtactttacgtgatccccctgtctcttatctccattttatagtaagataagaagtgacggctttcgcctgtttgattggagggatttcatgccaacaccaagcatggaagattatttagagcggatttatatgttaattgaagaaaagggatatgcaagggtatcggacattgccgaagcgcttgaagtccatccatcgtcggtgacgaaaatggttcaaaaactggataaaagcgattatttggtgtatgagcgttataggggtttggttttaacggcaaagggcaataaaatcggcaaaaggctcgtttatcgccacgaattgcttgaggattttatgaaaatcattggagtggacgatacccatatttataaagacgtagaagggattgaacatcatatcagctgggatgcgatagaccggattggcgaccttgtccaatacttccaagaaaaccaaacgagaatcgacgatttgcgggaaatccaaaagcgcaacgactttcccgaagacgagtaacgatcacagtttattaactccattcatagccccccacaaaaagaaggaaaccatccttcttttttcacatataggtgataagggggtgacgaaagtgaatgtagatgccgtgtttgcaggaggaggcgttaaagcgtttgcctttgtaggggcagtggaagcagcggaagaacgcaagctttcttttacacggattgccggtacaagcgcaggtgcgatcatagcagcgctgcttatggctggctatacgagtaaagagctgtatcggctgttagatcagcttgatgtcgtaaaaatgaaagatgaacggatgtcgtttttgcctttgcctgttgccaagtggatcaatctttactttcgcctcggtttatataaaggcgatcagttggaagcatggctgcaagacgttttggcggcaaaaggcatccgtcgttttgctgatcttccgagcggctcattgcgggtgattgtttccgacattactcaaggacggatggttgtgctcccagatgatttgcctaaatataaatatgaccccggcgcctttagcgtagcaaaggccattcgcatgagctgtagcattccgtatttttttgagccggtaaagctaaatgacagatccacgaaaaaaaagacgttttatatggtcgatggtgggttgctgagcaattttccgatgtggctttttaaagacggcagccaaggaggttggaggcggccggtgattggctttcaattagcgccccggcttgacgagcggccgccagcggtgattaacaatgctgttgacatgtataaagcgctgttcgaaacggtgacaagcgcccatgatgttcgctatattagtgaaaagcatgcgaaaaatgtcgtctttattccagtcgaggacatcaaatcaaccgatttttcgctaacgaatgaagaaaaacggcatatgattcaactcggtcgagaaaaaacaactgcctttctatcgacttggacaccttaaaaacaggaggctctttcacgaaagagcctcctgtttttagctaaacgcaatgggccgttccactattcccccaattgaattggggggataaacattacgcttttttcttgcgcttcggtttcgttcctttgccctcaatgacagtcaactgtggccctgaccggcgttttgcgcctttttttaatgggctttttgcctttgtcgctggtttggctccgttttgtttgaacactcgtttttgttcctgcttgtttgcagaactcgttcgttgcgctttttttatttgagcgcgtgtcggcccgtctttccgtttcggaaaaatactcgtgccgtaccgttttgcgatcacaagccgataaataaagtaaattgccgcgatggcgatcaccgctttgccaaccattgcaaagaagctgccaatgttgctgaaaatgccaattgccgccagtgcgagtaagacaacaaaaatggttttcattgggttattcacgtccatgtcccctttctaaataaaagcttaaagcttgcgcaaacacgttcgcaaaaatagcgtccatcgtctaaagcggttccatggacattcggccaaatgaggaagacacatgcacaagatcgtgaacatccaagatggggaaaacgaagttctgattttatcgctcattcatttataagtaaagtataaaacgtctatgaacagtgagcaaggcaaattgacgaaaattggtttttaaaagtatgtacggcaaatgcttgtttatacctttttttagcaaaaacgaacaagcgtacaagtattttttcatttagggcatgctagcaaatggaggtgtgcaagcatgtcaagaagaaaagagttgcatcggaaaataaaagaagaaaaacaaatgagctttactactaaaacgatgttgatcgggttttttggtgggcttatttggtcgttgatcggctatttctcttattatttcaattttacacaagtcgggccttcctttgtcttattgccatgggctttaggagagtggaaaacgggccacatcggtcaagttgttggcgtaggcgtcattgcgatttgctcgattggggttgcgtttttgtacaaatggatgctgcaaaaagtaaatagcatctggcctggagttggttttggcgtattgatatgggtgattgttttttacattcttaatccttttatcccacaattaaaaccagtccaatcgtacacagtcaatacactggtaacaacgttatgtctatttatcctttacggactgtttatcggctattcgattgcttatgagtattcggaacaaaacgaagctcgccattaatgagcgccccgtttcccagtggcaaaaattgtgctacaatttgcttattcaaggatgaagcgagggatagccatgtcgattgtaaaagcattgcaagcaaagctaagcgattatgaattggacggtttgctcatttccagcaacgttaaccgtcgctatgtcagcggttttaccggaacggctggcgctgttttacttacggaaacagacgcactgtttttgaccgatttccgttatactgaacaagcaatgaaacaagtcgttgattgttctgtaatggaacaaaaaggcacgctaccacaggaagttgccgcgcaagtggaacgcctccgcataaagcgccttggttttgagaaaacacagcttacatatgcagaatttgaaacatatcagaacttgctggacaatacgaaattgatccccgtttcgcaagtggttgaatcgcttcgtgtcattaaaacacaggaagagattgcaattatgcaaaaagcggcagcgattgccgatgaagcgtttgcccatatccaaggatacattaaacctggcgtaagagaaatagacgtatccaacgagctggagttttttatgcgcaaaaaaggagcgacgtcgtcttcatttgatattattgttgcttctggcgttcgttctgctttgcctcatggcgtggcttctgaaaaaacgattgagcatggtgaattggtaacgctcgattatggcgcttattataacggctattgttcagacataacacggacgctcgcagtaggggatatatcggatgaactgctagctatttatgaaacggtccgggttgctcaagagcgagctgttgagggcattaaagcaggcataactggcaaggaaggcgatgcccttgcacgagattacattgctgaaaaaggatatggtcaatattttggtcactcaacaggccacgggctcggcatggaagtacatgaaggaccgagtttatcaacaaaatcggacatggttttgcagccaggaatggtcgtgacggttgagcctggtgtttatatacctggcgttggtggtacgcgtattgaagacgacgtcgtcatcacagaaaacgggaactcgacgctgacccattcgccgcggacgctcattcatgtcggtgtataaagacacagagcgaaagctgtggtatagtaaacaaggcaaattgtgcaaatggaggaaacgaaatgatctcagtgaatgattttaaaacgggcttaaccattgaagtcgataatggcatttggcaagtgatggagttccaacatgttaaaccgggaaaaggagcagcgtttgtccgttcaaaactgcgtaacttgaggacgggcgcaatccaagaaaaaacgttccgtgctggggagaaagtcgcaaaagcgcatattgaaaaccgccgtatgcaatacttgtatgctagcggcgacacgcacacatttatggataacgaaacgtatgaacagcttgaattgcaaacagcacaaattgaatacgagctaaaatttttaaaagagaacatggaagtgcatgtgatctcgtatgaaagcgaaacactgggcgtagaagtgccgaatacggtcattttagaagtagtggaaaccgagcctggaattaaaggcgatacagcctcagggggtacgaagccggcaactttagaaacaggcttgacggttcaggtgcctttcttcgtaaaccaaggcgataagcttgtaattgacacaagatcggcttcttacgtatcaagagcataacagaatgaaagcggcttttcctgactaccaaggaaaagccgcttttttagccttcgatttcataggcgaggtggagcgattcttttaaatactctgcggcttcatcgacattgaacgcatctgtcgaaaagcgggagtgataattttcataagccttgcgtcttaccgtgtatagttgttttaattcaggcatcgtttttccttggagaatcgggcggttgtcaatcagcatgtggacacgatctttccaagactcaaatgaaagatccaaatggatgacaatgcagttcgcaaggcagcgctggcggatcgcttcttgtgtaaaagcgccgccgccaagggaaataattttcaatttttcattgcaagcagaaaaaacggcttccttttcatgttggcgaaaaaaagcttccccatgtttttcaaaaatcgtgggaatgctcatgttcaactttgcttcgatttcggcgtcaatatcaataaaatcacggtacatttttttggcgagcgcttggccaatgcttgttttgccgacgcccataaacccgactaaaacaatgtttttttcaattaaaggcacttctgttctcataggtggcactctcttttacaatcaatttgcttttagtatagcaaaaaaatcagcagcgtggggaggcgtatgcccgtttttacgaaacggcaggatgggcttgcgtaaaaggagaacatccgttaaattgaaataatgtcattttgattttattggctaaaatgttttagacgggccaattaactgtagagaagcttcattcaaaggagagaatttttttggctactaaaaaaaatccggtttcgtttctaaaaaagccttggctatcttctatttgtgtatttttattgtcacaaataatttttattatatttgagacgacaggctggatcccttatagggattttgatgatggaacgttatatggaaaaatcgttggatctcccatttttacaaagtggtttgctttttatgaagaaccacatatgaatttacttactatattttttggtatcttttttctagtacctggaattataggggcaataaaaaatatttttgtcactgggaaatagtggcttccacaaccgggcgcgattgttggctaaaagatacggagagctttctcttgtatctttttttatttgtaagtggttttgtccgttacattgaaaaaccgaaaggcaataaaaatgttctttttgctgagtcttgcttcggtccgtaaatggctgctatgaaacagtcgtttcatttgcgagaaaaccgttgtttatgaaccactcgttctattcgcatcttccctcgcctacacccctcgtctgtcaaacgttttctatccgtccgattcattttgttggtgtttttaatcgttttatcctgttctaaaacggtccatgcctttcatagagtgtacaaagtgcttgtctttcgaaaagaccgaaatggggtgaccggcaaattgaatatgtttgttgccattaaatgggcgcttcttgtcatggtagggttgaggctgctttctggcttgattgaaattagcgctgccttgctaatgctcaaatacaacagcattgaacgcgctgtagcgatcaatgctgtccttgccatcgtcggtccttcaatttttttactatcgatcgccattggcttgattagcgttgctgataaactgtcgccaagcaaattagtctttatcgccacaggcgttgccctcattttaattggcatccgcaaataggaggatcgcttatgcttcgtgacttactgcggctgtttccccagccggttcaatcttttatagaaagccttcgcacagcggaattggaggagcttgaagaaatccggttaagggtgggtcaaccggttgaatgtctgtttgcctcccgttctgtttattcaaccaatccgctataccgattttccgttgctgacgctagctatgttttaaaccaacttagccagtattcactctatgcgtttgaagaggaattgcaaaaaggctatatcaccgtagccggcgggcaccgagtcggccttgctgggaaaaccgttttggaaaatggcgcggtccagaccattcgtccagtcagctcttttaatgtgcgggttgcccgccaaaaaataggcgctgcagaacaggtaattgacaaactgtatgatcgacaaacacgtagttggcagaacgcgttgctcattggaccaccgcaaactgggaaaacaacggtgttgcgcgatgtagctcggatcgtgagcacaggaagcaaaaaaaaccacataccctcttgcaaagtcggcattgtcgatgaacgttcagaaattgctggctgtgtggctggtgtgccacagcatgaactcggggtacgggtggatgttctcgatggttgtccaaaggcagaagggatgatgatgttaatccgctctatgtcgcctgatgttctcatcgtcgatgaaattggcagagaagaagacgcaaaagcgattctagaagcacggcatgcaggcgttagccttattgccaccgctcacggccatacattggaagaagtagccaagcgccccgtttttaaagggctgtttgaacaagaggcgttcacttgtgtcattgaattagggaaaagcccgcaccctggtagcattaagcgagtaagacgcccgcagcaaacgaggatcatgcgatgaaatggttcggtgctgcgctcattcttttatgctccactctttacgggctagaacaggcgaaaaagctaagagacagacctcagcaaattcgccagcttcgtatagcattacaggcgcttgaagcagaaatgctttacgggcaaacgcctctcgctcaagctagcgaaaacattgccaaacaactagaaggcgcaatcggagacatgtttgcctgtttcgccgccaatcttcgggcgcgtaagcaaacggcaatggacgcttggagggaagcgttagaggctgtgtgggaagaaacggcattaaaaagcggagaacgggaagtgctgcatcagtttggcgctacgcttggaacaatggaccgcagccagcaacaaaaacagctaaagctcgcccaaacccatttggagcgggaggagcttgaagcgaaagagacacagcttcgctatgaaaaaatggcaaaaacgctaggcgtgcttgcagggctgttactggtcattttatttgtataaaaagcgaaagcagggaggatgagcaggtggcatatgatgtgaatacgatattccaaattgccggaattggcattatcgtggcgatgatgcataccgtgcttaagcaaatgggcaaggaagattgggcccactgggtgacgctaatcggctttgtcgttgttttatatatggttgccacaatcattgacgacttgttccaaaaaatccgcagcgtgtttttgttccaggcgtagccaaggaggtgagctgcgattgaaatcgtccaactagttggattagggctgattgccacatttctagcacttgtcgtaaaagagcagaaaccggcatttgcttttttgctgacaatgttcgttggcgcttttatttttctattcttgattgacgaaattgccgtcatgattgagatgatcagccagcttgccgaaagtgccaacatccatatggtttatttgcaaacgattttaaaaatcataggcattgcttatattacggaatttggcgcacaaattgccaaggatgccggtcaaagctcaatcgcttcaaaaattgaactggcaggaaagatttttattcttgtgctggcaatccctatcattaaggctgtcattgaaatgattttgtcgcttttgcccatgtcgggataaggaggacaagcgtaatgggaagcaaaaaaatcgccgtttccttgcttttctgcatcgtttgttgctttggccttcaaagcgagaacgcgtttgcagaagaaaataacgtccaaccgccagcagaagagctcgtaaacgagcagttaaacatattaaagcttgatgaaatccaagaatactgggagtccgtctcagaagagtacgggggctttcttcctgaaagccaaaaagggcaattaatcgattttttaaaaggagacaagcagtttgagctaaaggaatggggcgtcggcctcgttaaatacttgttccatgaattgatcgtcaatggaaaactaatgggaatgctgctgttgttaacgattttttcttatatccttcaatcatttcaaactgcattcgaacatcagacagtgagcaaaaccgcttatgcggtcacgctgttggtattagcgatgattgcaatgaatggatttcatacagccattacatatgcgacagaagcgattaattcgatggtgcactttacgattgcgttgctgccgctgttgctggcaatgatggcttccattggcggcgcatcgacttccgcattgtttcatccgattattatttttttagtccatacgagtgggttaatcgtcaatgctgtcgttttgccgcttttgttcatttcggctgttcttggcatcgtcagtacatttagtgaccactataaagtcacacgactagcgaatttattccggactggagcagttgggctgctgggcatttgtatgactgtcttcctaggcgtcgtttcagtccaagggacgacaactgccgctgtcgacggattaacgttgcggaccgcaaagtttatcgcgagcaattttgtgccagtagtaggacggatgtttacagatgcaacggatactgttgcgagcgcttcattgcttttaaaaaatacgatcggcatgagtgggcttgtcattctcttggctatatgcgcttttccagcgattaaagtgttgtcgattgcgtttatttttcagatttcggctgccgttctacagccacttggcgacggggcaatcattgattgtttagggatcatcggcaaagccgtcctatatgtgtttgcggcgcttgcactcgtcggcttcatgtttttcttagcaatcacattaatggttgcggccagcaacatcgcttttttgatgaggtgaggaggcgtgcaaaatcgaatttattaatgggtgggtaacgtcgattgtgctgttgattttgcttgcggtcgtcctagagttgcttttgccaaatacagcgttaaaaaattatgtcaaactggttgttagtttaatgctgcttgtcatgatgctccaacctgtgctttccctgtttcatcaagacccagaaaaatggctctacagcctggtagagcaggcatctcaacaagaaaaagccattgacattgaggaaaaaataaattcacaaaaaaaagagatagatcagttctttgatgcatatacatctgaacaagtggctgtccaactaaaagaccaagttgaggaagagttggcgagtcgtcatcaaatgttcattacgcacattgccgtggcggagacagcagaggaacctggagtggcaatagaagtccatgtaggttcgtcggaaaaaccagagtccagcttaggcgcggggaagcccattgaacctgtatccattgaaatcgacacaaccaacgggcgtagccagcaaaagccaattgaaaacaaggatgagcttgctctgtttttggccgacgaatggggtgttccagagtccgcaattacattggtaagagaaggaggggtgggtgaatgaatgacaaagaaaaagctgacgattggtttaaaaaatggctaccaaaacagccagataaaaaaaaacgcagcttttcgcccaaatacatcttactgctaggctgtctcggtgtagcgttaatgcttttgagtcaatttttgcaaccggaaaatgatgacgcaatgccaactacaaatgaggcagactcgaatgaagacggcgaggaggacacagcccctgtgtttggccggaaagtcgaagaaaattcaatggctgactatgaaatgcgctatgaaaatcaattgcgcgaggcgctgcaagagatagtcggcgtcaataatgtctcaatcgttgtcaatctcgcggaaagtgaaaagcaagtctatgaaaaaaatgtaaaacgcgggcgccaagagacaaatgagacagaccgtgaaggcggcagcagacaagtagaggatacgcaagaagaagaaaatgttgtgattacccgcaacggcgatcaagatgagccgcttgtgatctcgaaagaaaaaccagcggtagcaggcgtgcttgttgttgcggaaggagtggaaaatgtacaagtaaaggcttgggtagtagaagcggtgagccgtgtgttagatgtagcgccccatcgcgtatctgttatgccgaagaaaatgaaggaggaataaaaatggttcttaaaaagcaaacggtttggctattgacaatgttaagcttaatgttggttcttggtgtgtactatgcctatccaggtaatcaaaacgccggggatgaagggacagacccaatcgcttcagaagaagcaggggtggaagtcgaagtaaatgaagatggcacggttgatggtgatatgatcgcaagcctctctggtaacgacaattacacggaagcgcgtttaaaattgaatgaggcacgccacaaagaagcagagcagtatactcgtgaagcatctgctgaaggcagctcagctaaggaagcggtagccgcgaacgacaaatcgattgaaatccttgctgtaggggacaatgagcaaatgctcgaatcactcttgcgtgcagaagggtataatgatgcgctcgtcatgtctgaagcagatagcgtacaaatcatggttcaagctgaaagcctttcaaaagccgaagccaactccattatgcagcttgccaaagagcatttgcaaacaacggcagacatttcggtccatttggacgaaatagcagaataatactagttattagcggcttgatgcagcctttgcacaagctgctttttttgcaacatgcattcctcttctacacatggtataatacagcaatgtataatgaagtaaggagagattgcagatggaatggtctgatttaacagagggagcgaaagctgtcctcgagcagacgcgcaatataaaaaatgaccatattcaaatcgtcgaatttgaagttggcttttctgaagaaatcgaagacgaagacggcgaccgtgtgagcgtgtcgatccaagaggaagactacgaaaacttaaagcgttatacccaggaaaatgaatacggggaaaagtaccatatggcccgcaataaaaatattgttaagatcattttgctggaaaatgggaaaataccggacaacctctcggaatttcctgtgtttcggcaatacaaaaaagacgcacaaacgacagaagaacaagagtaagggggagcactccctcttacgcctgcaattttactacataataaaggatttttcctcgcgaaccccgaacgttagtacatgatgtatgggacgggtggcgctgaagtggtatgaccactaaacgaagcaattgaaaaggagctgctacaagatgtttaaagttgaagaaattaaaagtctaatagaagcacttgattcctcttctcttgaggaacttgaattggagcaagaaaatggcaaacttgtattaaagaaaaacaatggtcaagttgcagtgccgctcgaacagccgacagccgctgtacaaaaagcgcctgctgcagcgccagcaccagtggcgcagccggaagaaatagttgaaagcaaagagccagaagccgatgcagatggccgggatttgtttacagttacgtcgccgatggtagggacgttttatgctgcgccatctcctgatgctgatccgtatgtgcgcacaggcgatagcgttgaggaagacacggttgtctgcatcgttgaagcaatgaaactaatgaacccgattgttgccgatacaaaagggaaaattgtggagattgtggcagaaaacggtgaacttgttgagtatggacagccgctgatggttgttgaacggaataagtaggggcgataacgatgatcaaacgaattttaatagcaaaccgcggcgaaattgccgttcgggtcattcgcgcgtgtaaggagctcggcattgaaacagtggccgttttttctgaagcagatgctgattcattacacgtccaacttgcagaccaagcattttgtattgggccaacggagtctgccaaaagctacttgaatttcacaaacttaatgagcgtggcgacattaacggaaacggacgcgattcatcctggctatggctttttagcggaaaacgccgatttcgcggaaatttgcgcagactgtaacattacctttattggcccaagcccgacagcgataagccggatgggaacaaaagatgttgcgagggaaacaatggcaaaagctggcgtgccaatcgtacctgggtcaaatggaattgtggaaacaattgaagatgcaaaacaaattgcccgcgatattggctaccctgttattattaaagcaacggccggcggaggcggtaaagggatccgtgtcgcccgcaatgagaaagaattagaatcgggcataaaagtgacacagcaagaagcagagacggcctttggcaatcctggcgtttatttagaaaagtatattgaagatttcaggcatgttgaaatccaagtgcttgccgataaccacggcaatgttatccatttaggcgagcgcgattgttcgattcagcgccgtttgcaaaaattgcttgaagaaagcccttctcctgcaattacagaggaaaagcgtcaagaaatggggcgcgcggccgtagaagcggcaagggccgttcaatactctggagctggtacagttgaatttatttatgaccacaatacgggcgatttttatttcatggaaatgaatacgcgcattcaagttgagcatcctgtgacggagatggtcaccggtgttgatttgattaaagaacaaatccgcatcgcagacaatgaaaagttgtcgttgacgcaagaagatgtcacgtataatgggtggtcaatcgaatgccgcattaacgctgaaaatccagaaaagaactttatgccatctccaggaaaaatcgttgactaccttgctcctggtggacttggggtccgcgttgattcagctgcttacccaggctgcgtcatctcgccattttatgactcgatgatcgccaaagtaatcgtgcatggcgctactcgggaggaggccattgcccggatgagacgggcgttgtctgaatttgaaattagcggtgttgatacaacgattccgttccatctccagcttctaaaccatgaggtgtttgtttctggcgattttaatacgaagtttgttgaagaacatgatgtgatgccagtaaaaaaataagcaaaggggcgtttaaacatggaagaccaccaactgttagaacttgacgagcaaaaaggcgggcttgggaaagtcgaaatctctccagaagtcattgaagtgattgccgggatcgcgacacaggaagtggaaggtgtggctgccctaagaggcaactttgctgctgatgtagccgaacgccttgggagaaagaaccatggaaaaggcgttaaagtggaactaacggaagaaggcattattgtcgacgtatccattattatttcctatggcgcggctgtgccggaagtagccaaattaatccagcttaatattcaacaagcgctggaaacaatgacggcgattcgcttaaatcaaatcaatgtccatgtcgtcggtgtttactttgagtccccagaagcacaaaactcagtggataacgactacgaataagcgccttgagacttgattcgaaaaacttgatcaggctaatagaaaacgcttgtcaaccacaacgtatgcgagcgtttgtctacagtctgaaaaaccggctactgccggttttttctgtttttacgtcgccgctgatttgcgctatactaaacaagacaaatcataaaggagttaattatgaaccgacgtgtagcaaggctgcgagctgtgcaaacactctaccagctgactttaattgatatcaacgtggacaaagcgatcgaaaatacgctaaatgatgaagaagaaccgagcgaattttacaatacgcttgtccatgggacgcttgaacaccaagatgaaattgacgggtatttaagcgaaaatttaaaggggtatacgcttgaccgactgggccacgttgaccgggcaatcgcccgcatggggctgtttgagatgttgtatttagacgatatccctgtaaatgtaacgttgaatgaagcaattgagcttgcaaaagcatttggcgggactgatgcggggcgttttatcaatggggtattgtccaattcatatgatatggcaatgaaaaacaaataaattaggaggctcgtgggatggctggaaatgctggtgtcgctgaagcttggacagtaagcgaagcgacacgttacattaagcaattgttagaagacgatccccatttgcctgaaatatggatacgcggcgaactttccaattttaaacagcatacgcggggccatatgtattttacaatcaaggatgaaggatcgagaatgcaagctgtcatgtttgctggctataaccgcttcctccgctttaagcctgagaatggcatgaatgtgctcattcgcggtgaaatcaatgtgtacgagccatatgggcagtaccaattttacgccaaagaaatgcagcctgacggcatcggcagtttgtttgccgagtacgagcgtttaaagaaagcgcttgaggcagaagggctatttgccgaggaacgtaagcgcccgattccccgttttccaacgcatattgcgattattacgtcgccaacaggtgctgtgatccgtgatatgatgacgacattaaaacggcgctatccgcaaatacgcgtgacgctttttcctgtacttgtccaaggagaaggggcgcccctttccatcagccgcgcgctggaacaggcaagcatggccaatatatttgatgtcgtcattgtcgccaggggcggtggctcgattgaagagttgtgggctttcaacgaagaaatggtggctcgggcgattgcagaagctgctgttcctgtcatttcggctgtcggccatgaaacagactttacgatcagcgattttgcagctgacagacgggctcccactcctacggcggcagcagaatttgcagtgcctgatgcccgtgaactaatggagcatatcggccatttgaaaaagcggctagaacgttcgcttgtcgagcaagtgaaaacaagacggagagagctagagcggctgaaacgctcctatgcgtttcgttaccctgtccagctcgtccaccaaaaagaacagcaacttgacgggctaatggaacggttaaaccgggccatgcaaataaaattggagcaaaagacactggcgtttaaacatatgaaccaagccattcttcgtcaacatcctgctaccagggtgagccaattgcaaaaagaacgacggcaaaaccatgcccgtctcgttcgagcaatggcggcagagacgcaaaggaaacggcaaagcctgtctgccgtaatccaacaacttcagctcttaagcccgctagcagtaatggacagaggctattcgctcgtttacaaagacgaggcgttagtaaagacggcaaaagacgtggagattgaagacgatatcgtagtgaaactggcagatggaaacttacactgccaagtagtggggaaacgagaaatgaaaaatggaggtgaatcaaatggctgaaacaaaggatttgccgtttgaggaggccatgaggcagttggaatggctcgtggaaaaactagaggaaggcaatgtccctctcgaacaagcaattgatatgtttaaggaaggcatggacttatcgcaaagctgtcatgaaaaattactgaaagtcgagaagcagcttgaccaaattatgcatgaggatggggaactggttgaagcgaatttagaagaggaggcaaacgagtgagcgcattgttccaaacgttcttagaagaggctaggcagcttgtcgacaaaaagttgcctgaatacgtgcgggagttagaggctgagcaccggttaaaggaagcgatgctttactcactcgaagcaggcggcaaacgagtgcgtcctgtgttgttgttggctgtgttggaggcatataaccaaccgattttacatggcctcgacacagcgtgcgcaattgaaatggtacatacctattctctcgttcacgacgatttgcctgcgatggatgacgatgacttacgccggggccagccaacgaatcataaagtattcggagaagcaacagcgattcttgccggcgacgctctattgacacaaagtttcgccttgattgccaatgccgacgctcccctttcggcaaaaacaaaagtttcgatcattgctgctctctctaaagcggctggcgctagcggcatggttggcgggcagcttgcggacatgtttgcggaaggaaaacagcttaccgttgaacagcttgccaacgttcataagcgcaaaacgggcgaattgttggctttttcaatcgaagcaggagcgcttattgccggggtgtcaaacgaggaacggagcaaattaaacgaatttggacaggagattgggttattattccaaattaaggacgacattcttgatgtagaaggcgattcaatcgccatcggtaagcctgttggcagtgacgctgtcaataataaaagcacgtatccagggcttcttggccttgatggagcgaaaacaatgcttcacactcattatgatcgggctttacaagtactcgatgagcttcatttgcgggggacgttgctcgaggatttggctaagtacatcgttacacgtgaccattaaacaccaaacagggaaaagagaaagctggaaggaagatcgaacggctttatacaacgaggcaaacgacgacgtatgggagcgtttgcctgcagtctgaaccaacctggagccggttggttttttttatgaacagcgatcgtaggttattgctgttctttccgtccatctttttgttataattgcctaaacaaagacaagactcattctccggtaacagcgattgatttgtaggagagaagcagaacagaaaatgggggtttcagcgatgaaccttgaagaaatccaagacccgagctttttaaagaactattcgaataaacaattggaagagcttgctgcagacatacgtcgttttttgatcgaaaaactttcggcgacaggcggccatattggaccgaacttaggggtagttgagttgacacttgcgctccaccagctttttgacagcccgaaagataagttgctatgggacgtaggccaccaagcatatgtgcataaaattttgactgggcgcgcacctcaatttgacacactccgccaatacaaaggcttatgcggctttccaaaacgtacggaaagcgagcatgatgtttgggagacgggacatagctccacttctttgtcaggggcaatgggaatggcgacagcccgggatttaaaaggaaccaatgaaaacattgtggcgattataggcgatggtgcccttacagggggcatggccctggaagcattaaaccatattggccatgaacagaaacatttaattgttgtcttaaatgacaatgaaatgtcaattgcacctaatgtcggtgcattgcacagcattcttggccgcttgcgtacggctgggaaataccaaaaagcaaaagaggacttggaaacgattatccgcaaaatcccagcctttggcgggaaacttgcagatacggccgaacgattaaaggacagcttaaagtatttaatggtatcaggcatgttttttgaagaaatggggttcacttatttaggacctgtagatgggcatgacttagacgatttaaaacaccagctaagctatgcgaaaaaaacatcaggaccagtattggtgcacgtgctaacgaaaaaaggcaaaggctataaaccagcagaagaagatgcgacaggagcttggcacgggacagggccgtacaagatggaaagcggtgaaatggtgaaaaagcctggaccgccaagctatccgagcgtttttgcaaacacattaaaacgaattgcccgcgaagatgaacgggttgtagcgattacgccagccatgccaggaggctcaaagctcgacttgtttgctgaggagtttcctgatcgcatgtttgatgtcggcattgctgagcaacatgcagccacgatgtcggctggccttgcgacacaaggaatgaagcctgtttatgctgtctactcaacctttttgcaacgtggctatgaccaagtcgtccatgacatttgccggcaaaacttaaatgtgcttattgcgattgaccgtgctggccttgttggtgctgatggggaaacacaccaaggcgtattcgatattgcgtttttgcggtcattgccaaatataacgattttaaacccaaaagatgaaaacgagttccagcatatgctctatacaggcatttgctacgacgacggcccaattgcgatccgctatccccgtggaaatggcacaggcgtgaaaatggacgctagcctttcaaggctgccaattggcaaatggaatgtgctccaagaaggcacagatgccgctattctcacttttggcacgatgatcccagtggcagaaaaagcgctggcgcaattaaaacaagcaggctataacattcgtctcattaatgcgaactctgttaaaccacttgacgagaaattgcttgaagcgcttgctgaagaagagctgcccctgctgaccatcgaggaatctgtccttcaaggcggctttggcagtgctgtacttgagttttacaatgagaaaggcatgcacgtggaattgaagcggatgggcattcctgattattttgttgagcatgggagcgtaagtgagctctatcaagaagttggattaacgccagagcggattgccgacacgctcattagcatgttgccgcaaaagcggaagagggcctaagcgaatggcagtgaaagaacgccttgatgttctcctcgttgaaaggggactatgtgagacaagggaaaaagcaaaacgaacgatcatggccgggcttgtctatagtgactccgagaggcttgacaagccgggcatgaaagtagccgttgatatgccgctgcgtattaaaggagaacaaatgccttacgtgagccggggcggcttaaagctggaaaaagcgctgcagacgttcgattttcctatcgccggaaaagtcggccttgacattggcgcgtccactggcggtttttctgactgcgccttgcagcatggagcggagcacatgtatgccgttgatgttggctataaccagcttgcttggaaaattcgtcaggacgaacgtgtgacggtgatggaaaggatgaatttccgccacgctgtacctagtgattttggcaacggcattccccagtttgcgacgatcgatgtgtcctttatttctttgcgtttaatgttgccgccgctttttgcaattatcgctaccggcggggatgtatgcgcccttataaagccgcagtttgaggcagggaaggaccaagttgggaaaaaagggattgtccgcgacccggctattcatgaacaagtgattgaaagcatcgccgcttttagctgttcgattggatttgatgttgtcaatttaagctattcgcccattacgggcggtgaaggcaacatcgaatttttaatccatttgcaaaaaggcagtgggcgcatggatatacaagagggagtcattcgccaagtcgttgagtcctcccaacgtttaaaaaaccattaaaaaacaaaggaaagccaagctggcagcagaacgggcaagcttgccaaccggccgccatgctggatatcttggagaaggcagcggcatgcggccttctttttttgtagataagcaagtgtatcaatcttgccgaaagcgggcaaaccgtagataatataaaaaagacgttgttcgttgcaaaaattgaatttaatttgaggtaaggtgagggcatgaataaagggcaacgccatattaaaatacgggaaatcattaccaattatgaaattgaaacacaggatgacttagtggatcggctaaaaagcgatggctacaatgtcacgcaagccacggtttctcgtgatatcaaagaacttcatttagtaaaagtaccgttgcaagacgggcgttataaatatagcctgcctgcagaccaaaaattcaacccacagcaaaagctgaagcggattttaaccgacagttttattagtattgatcgtacaggcaaccttgtcgtcatgaaggcgatgccaggcaatgcgaacgccatcgctgttctaattgataatttggattggaacgaattaatggggacgatttgtggagatgacacgattttaattatttgccgtaccgagcgagatggacaagttgtaacagaacggttcttgaatatgctttgaggaaggtggcgagaggatgttaatggaactgtcgataaaaaattttgccattatccgctctttaacagtcccttttgaaaaagggttgaccgtgttgactggggagacgggcgcaggcaagtccattatcatcgatgcaatcgcattattgttaggcgggagagggtcagccgagtttgtccgctttggcgaaaaacgagccgaaattgagggcttgtttgcgattggcgagaaccacccggctctaaaaaaactcgacccaattggcgttgaatgcgaagaaggaatgctcattctccggcgtgatattacagacgctggaaaaagcatttgccggataaatggcaagctgacaacgattggcatgttgcgggaagtcgggcagacattaatcgatatgcacggccagcatgagcaccagtcattaatgcggatagaagaacatgttgaactattagacagtttcggtggcgaggccttaaaaaaaacgcgtgctgagtatacaaggttgtttaatgaagtccaaaaaatgacggaccggatcaacagtttaaatcaaaattcgcaagaaatggcaagaaaagccgatttgtatgcgtatcaactacaagaaatcgaacaagcgaagttaacgccaggagaagacgaagagttgctggctaaacgttataaactagccaatagtgagaagctttatgaggccttaacccgtagttatgaacatatgtacggcgaggaacgaggcctggattacatgagcggcatgctttcccacttagaaactgctgcctcgattgacaaggaattagcgcctttatatgaacaaatgtcttcaagctactatatgcttgaagaaggtacgtatgcgattcgtgaagcgattgaagcaattgattttgatcccgaaacacttgcgtttattgaaacgaggcttgctgaaatcgacaagttgaaacgcaaatatggtgattcggttgaaacgatattggaatatgccgccacgattgaggaagagctggaagcgatagaacataaggatgaccggttagcgaatttaaccgaaaaacgcgacgcccttgtagaggacttgttgcttgaagcggaagcattaactgatttgcgcaaggcggcagcagctgaattgatggaagcgattgaaaaacagctgcaggacctgtatatggaaaaagcgcagtttcaagtagcgattgagccttatccaaataaagaagatctatctagcttaaaacggttaggccaagaccgaattgaatttatgatttcggcgaatccaggtgaaccgttaaaacctcttgcgaaagtcgcttctggaggggaattgtcgcggattatgctagcgctgaagtccgttttttccgcaaaagaaggaatgacctctgtcatctttgatgaagtggatacgggcgtgagtggcagagtcgcccaggcgataggtgaaaaaatccaacgaatatctgctggctcacaggtgttatgtatttctcatttgccacaagtggcagcattagctgaccaccatttgtatatttccaaaaccgaaatcgataaccgcgtgttcacaagcgtcaaggttttaaatgaaaacgaaaaagtggacgaactggcacggatgctttctggcgtcgaagtgacagatttgaccaggaaaaatgcagaagaattgctcgcgcttgctcaaacaaaaaaaatgtagaaaagctacccattttgggtggcttttttctcttttgcatggttataaatatggccgtaggaggcaacattaatagtacagccagcatggaggtgtgggttgggagcgaggagtgaaacgtttgagaaaagagggtgtacgatatgtaattggcgtcttgctttttttatgtgtggtagggctaggtttttcaccacaagtaaggcaatttgtcaatacgcctgttgacctgaccatatttgaaggaagcaatgctgttattgaaatggctggcgcaactgctaaaggccatgttgttattaaggaacaagataaccgcacttatttgcatggcaaatcgcctggcagcgaagaagttcttgtaaaggctggcccgtggccagttaaagcgattgacgtttctgttttaccgagcataaaagtgattcctggcggtcagtcgattggcgtcaaactaaacacggaaggcgtcttagtcgttggccaccatctgattgaaacggcaaagggacaaaaatcacctggggaatttgctggaattgaagtgggtgaccggattacgaaaatcaacggcatcaaaatgcactcaatgaatgaagtggctaagcttgttcaagatgccggggaagcaaacaaagaactgacgatagaagtactccgcaatgaaaaaccaattaaaacggttcttaaaccagaaagagcaaaaggcgaccatttgtaccgtttaggcctctatattcgtgattctgcagcgggtgttgggacaatgactttttatgaaccacaaagcatgaaatatggggcgctgggccatgtgatttcggacgtcgacacccgtaagccgatttcggttcacgatgggcaaattatgcgctcttctgtcacatcgatctcaaaagggctccatggcgaacctggcgaaaagttggcgagcattgcgaaagaccaagacattcttggcaccattagcaaaaacagttcttttggcgtatttgggcaactggatcaaaaagcgaagatgaaaaatggcttgtatgacgaaccgatggcaattaccacagcagatgaagtgaaagaagggcctgccaaaatcctaaccgttctcgaaggggaagaagtcgaacagtttgatgttgaaatcgtcagcagcgtggctcaaaatgggcctgcgacaaagggaatggtcattaaagtgaccgataaaaaattgttgcaagagacaggcggcattgtgcaggggatgagcgggagcccgattattcaagacggcaaattgattggcgcagtaacgcatgtatttgtcaatgacccgacaagcggttatggctgccacattggttggatgctggaagaagccggcattcatacaggattgcttgaagctaaagcgagttaattactcgttttagcttcttttcgtgtaaaatccttttattcctattttttgtgcgccattctttgatacaatggtactggacaatttatgtcgaacaaatgggattttaggagaatacggtctattttaaattatttaaaggattgcagccatccttgtcgaatcgattacatacaccaaaaggaattgggggaaaacgagatgagcaacgttacagtctgcattgcagatgataaccgcgaattagtccatttattgagtgaatatgtaggtgctcaaccagatatggaagtaatcggaacgtcctttaatgggcaagaatgtttaacggttgtagaagaaaaaatgccagatgtactactgcttgacatcattatgccccatttggatgggctagctgtgctggaacgtttaagtcaacgggagaaaaagccacaaattatcatgttgactgcttttggccaagaagatgtaacgaaaagagccgtcgattttggcgcttcctattatgtattaaaaccgtttgatatggatgcgttaatggagaagatcagggagataggcggcagcaaaaaagcgaagcggacaagaacatcctctttgtcgtttcatactgctcatcgccctgaagacaggcaaatcaacttggatgcgagcattacaagcatcattcatgaaattggtgttccagcgcatataaaagggtacatgtatttgcgtgaagcgattacgatggtttataaagacattgaacttcttggctcgatcacaaaagtgctttatccggacatcgctaagaaattcaacacgacagcgagccgagtcgaacgggctatccgccatgcgattgaagttgcgtggagcagaggaaacattgactccatttcaaatttatttggctatacagtaagccagtcaaaggccaaaccaaccaactctgaatttattgcaatggttgctgacaagctacggattgaacataaggtgagttgaaacttgaataggcaagaaaccaagcgcttaagccgaagtgtcttggtttttttgcgtaaaaagaacgaatgggcccatactaaaggagaggtggtggctatgacacttacaaaaaggaagatgttctttcccctattgtcggaaaggacaaatcgaaagaacccattaagtacaaaggcagaacgagctaatgcgggcaatcaatggttgtgtgcgaaagacgttcgtccattaaagcgtgtcgatcctaaatgattacattgtttttattattgccgctcctttccattgccctgaatattggttttgctgatgctggatgggcattatcagacagcggtggcaaaaggaaaatgccatttagcctaggggcttttatattatttagctatgctgctttatgcagccaactagcggggtcggtggcctttttttcttatttgccgttagcgtacgccacgcttgtttgggcaattggtttttattatgattggcgcaagagcaccgatatcacgagaaacgttttcgtttggaatgatccactaattcttcttgggattttagccgctatgttgttcgcttggcagatgacaagcatggctagcttctggcattggctcattgcaattgcgttgttggtgatgcttccttacaccggacaaaaaatgaacaaacatccacttttcttatggaaagccagcttctgttttcttgttgttgtctttttcgtcatcgagacgcctcaattcgccgacgtattatacgttgtcactgtgttttatattgcttttgtaatggagggagaacgtgaagcttgttttggtacaagcggggcgttgttgctcggaagcatggcggcgatttgggccatatctacccattctttgacactgcaatttgcttgtttagccgtatccatatttttggcgtatataccgttgacacaactgcctagcagaataggtgtttttcgctggatgggcgaattaggaataaacaagcatgaataaaaagcataacgagctcgctatgctttttttcgcgtaaatgaacgagtgacttttcctcgttttttatcacggtgaaaaataaaaccggccaaaaaccacatccctaacgcaaaaaagagcaatcctgccaaaaactgaacccaaatggccggataaggcggttgttgaataaagaaaaaggcgtcgcgcattagcttgattccatagccagcgccgataatcggaataagcaatatgcataaagcgatcactctgcccatgatatcccaactttcaaaaagtcgctttgtttctggagtattctttctctattgtaaaggagtttgccaaaaaagtacatgtattagttgcatcctgggcgtaattgtacgatacttaaagaactaatagcagcgtatatgaccaagtcctaattttggggtgatagagtgaacagcgcgatttttgtaggctctggcaatgaatcaaaacagttgctagccgtgcttttgcaattagaattgtttacgtcaatcgcagtaatatcaaatgatgccccgattcaagtgcttgccaaaaagcatcgactgccttgttaccctgatgcacaagaagggatacaaccagccgacgttgctattagcgatgatccgcgctgggattcattctgtgtaaaaagatggacgttccaaatggcgtgggaaaaagtgctggaagcaatcaaagacgacttgctcatgaaaaaagcaattcatgcgattcaagacgggatgattgttgtcaatcgttttgcccaagttcaatttatgaatgaagccgcagcacatatggctggcgttgaacttgctaaagcaattggcaagccaattcaaacacttttgccttcgagcggcttaccacgggtgatcgaaacacaacaaccggagtataaccaattgcatgaatttgataatggcacggttattgtcacgacgcgtgtgccccttatttttggcggcgcgtgtagcggcgcaattgcagtctttaaagatgtgacggaagcgacgcaattggccgagcaagtcacggacttgcgtagcattcaaacgatgctcgaagcaatcataaattcatccaacgatgcgatttcagtcgttgatgagaacgggacaggcttaatggttaatcccgcttatacaaagctgactgggcttgacagcgatcaaataatcggtcagccggcaacagctgacatctctgaaggggaaagcatccatatgcaagtgttgcggacgaaaaaacctgtccgtggggcacggttgaaattagggccccataaaaaagatgtcatcgtgaatgtagcccctgtagttgttgatggcgaactgaaaggaagcatcggtgtcatccatgatgtgtctgaattgaatcgcctatcgtcccagttacaacatgcacaaaaacggctggcaacattggaggcgacctattccttttccgaaattgtcggcacttcgaaagaaatggcctttgcgattgaacaagcaaagcgcggcgcgaaaacgtcgtttcctattttgctgttaggggaaacaggtacagggaaagaattgtttgcccatgcgatacataacgaaagcgaacggaaagggcagccatttgttcgcgtaaattgtgcagcattgactgagacgctgcttgagtcagagctgtttggctatgaacaaggtgctttctcaggagcattaaagtctgggaagaaagggttgtttgaagaagcagagcatggcagcatttttttagacgaaattggagaaatgtctcctaatacacaagccaaactgctgcgtgttttacaagaacaggaaatcgtccgggtcggtggcacaaagcccattcctatccatgtccgtgttatcgctgccacaaatgtcgatttagagggagcaattcgtgaaagacgatttcgagaagatttgtattaccggctgaataaattgccaatccggattccccctttgcgtgagcggctaagtgatttgcctgcgttaattgaccatcttcttagaaagttaaatttagattatggccataacatccagtcgatttcaaaacttgttctttcccgttttgaagggtattattggccggggaatgttcgcgaacttgaaaatgtcctcgcccgttcgatgatttacatggaccttggcgcgacagaattaacagatgtctcgctgccccaggaatttggccagtcaggcaaaagggaagaaagcgatgctacagctccaaaacaacttcaggcgtttttagctgaaaaagaaaaggaacatttgcgacgtacgcttgctgaagtagatggtgtaaagacagaagcggcgaaactacttgggatttccattcgctcgctctattacaagcttgaaaaatacaacctcgcataattttgcctgcaaaaatatgcatgcctgcaaaaacgtgcaggaaatagcagccaatgttaggtatttttatccctaaaagattggcatatcttttgcatgtttgtttaaggaccaagcggcaatagagccatagcttgagtgaagggggaccaaaacatggaattatttgcaaagatggtagagcgcgattacgaacaagtagtcgtgtgtcaagataaaacgtcaggattaaaagcaatcattgcgattcatgacaccacacttgggcctgcgttagggggaacaagaatgtggaaatacgccacggaagaggaagcgattgaagatgtgctccgtctggctagagggatgacgtataaaaacgccgctgctgggctgaatttgggcggaggaaaagctgtgattattggcgatccacgctcagataaaaatgaggaaatgttccgggcgtttggccgctatatccaagggcttaatggccgttacattacagctgaggatgtgggcacgaccgttgaagatatggatatgatccatcaggaaacagactatgtgaccgggatttcgccggcatttggcgcttcgggaaatccttctccagtgaccgcttatggtgtttatgtagggatgaaagcggcagcgaaagaagggtttggttctgaggacttagctgggaagacgatagcagtccaaggagtaggcaatgttgcttacaatctctgcaaatacctccataaagatggagctgagctgattgtaaccgatattcataaaccgtctgtagagagggctgttgccgattttggtgctactgccgttgatccaactgagatttacagcatcaaatgcgatattttcgcgccatgcgcccttggaggcgtcattaacgatgattcccttgccaagctgaaggcatcagtcattgccggtgctgctaacaatcagcttaaagaagaaaagcatggtgttcgcctgcaagaaatggggatcgtatatgctcctgattacgttattaatgctggcggcgtcattaatgtagcggatgagctaaacggatataatcgtgaccgggcatttaaaaaagtcgagggcatttatgataatgtcgcccgtgtgtttgaaattgccaaggaagaaaatatccctacgtttcaagcggctgaccgtatggccgagcagcggatcgagcgggtccgttatgcaagagggacgtttttgcaaaatgagcatcacatcctttcgaggaaaaagtaagcaggaagaggtgggctaaatggcggaaaactacgaccttgtcattgtcggaggcggcattggcggctatgtgagcgcaattcgcgccgcccaagaagggttgaaaacagcgctcgtggaacaagcattgctaggaggcacatgcttgcataaaggctgcatcccaagtaaagcattgctaagaagcgcggaagtgctgcgcaccgccaaagaagcaagcgtgtttggcgtcgcaacgggaccagtcgcatttgattttgccggtgcgcaaaaacggaaacaagagattgttgatcgtttagcgcaaggggtaaaggcgttaatgtcaaaagggaaaatcgatgtgtacgaaggaagagggcggatgctcgggccatcgattttttcgccgagtccaggcaccatatcagttgatttggctaatggcgacaatcaaatgcttattggcaaaaatgtcattttggcaacagggtcggtaccaagaccacttccgcatacaccctttgatggcaaacaaattttaagctccgatgacgttttgcagctaaaagagctacccgcgtcgatggtgattgttggcggcggtgtgattgggattgaatgggcttcaatgcttgttgactttggcgttagcgtcaccgttgtcgaagcaagtgaaacgattttgccaacagcagatcaagcggtagcggcagaaatggaaaaacagctgaaagcgcgaggggtcgtgttttatacgaacgcccaattagatgaacaaacggtggccacgacaagttcaggcataaaggcgactgtgcaccaaaatcaagaagaacataccattgaagcagaaaaaatgcttgtcgccatcggccgtgtcgccaatgtctctgacattggcattgacaatacagacatcgccttggcacatggctgcattgctgtaaatgaatatgggcaaacaaaggaatcacacatttatgccgttggcgactgtgtcggcggtttgcagcttgcccatgtcgctgcccatgaaggtattgccgctgtttcccatatcattggcaaacaggtcgaaccagttgatccgcttgctgttccttcatgtgtgtacagttttcctgaagcggcacaagtgggaatgacagaaacgcaggcgagagaagcaggccatgctgtgaaaattggcacatttccgtttgcgatgaacggcaaagcccttattcatggcgaggcaggcggttttgtcaaattgattgccgataaagacacaagcgatttattaggcgtccatattattggcacgcacgcaacggatttaattagtgaagcggcgcttgcaaaattccttgatgcagcggactttgagctagcagaaaccgtacacccgcacccgactttagcagaagcgatcggcgaagcggcgctggcagttgatgggtatgcaatccataagtagaggggatgggaagatgacgaacaaaaaacatgaaacgcttggattaagcgatgctgaagtggtggaaatgtacaaaacgatgttgcttgcaagacgaattgatgagcggatgtggctcttaaatcgggccggtaaaatcccattcgtcatttcctgccaaggtcaagaagcggcccaagtcggcgctgcctttgccttaaatcgcgatgttgattacgttctcccgtactatcgcgatatgggcgtggtgctggcatttggcatgtcagcgagagatttgatgctttctggctttgcgaaagcggaagatccaagttccggcggccggcaaatgccagggcatttcggtcagaagaaaaaccggatcgtcactggttcttctcccgtgaccacacaagtcccccatgcggtcgggatctcacttgcgggcaggctagagggcaagaatttcgtcacgttgacaacgtttggcgaaggatcgtctaaccaaggtgactttcatgaaggggccaactttgccggcgtccataaacttcctgtcatttttatgtgtgaaaacaacaaatacgccattagcgtcccaattgaaaagcaattagcatgcgagcatgtcgcagaccgggcagtaggctacgggatgccaggggtaacggtggacggcaacgaccctcttgccgtatatgaagcagtcaaaacagcagcggacagggcacggcgtggggaaggaccttctttgatcgaaaccgtttcttaccgcttgacacctcattcaagcgatgacgatgaccgcgcttatcgctcacgggaagaagtggcaaaagcaaaagaaaaagacccgcttgccacatttgcaacctatttattagagtcaggaacaatcgatgccactggaatggaaacgttggaagaagaagtgaaacaaatcgtcgacgaagcaactgattatgcggaaaaggctgcttatgctgccccggaaaccgcttatttgcatgtgtatagcgaggaggcaaactaatggccgtaatgtcctatatagaggctgtcacaagagcactcgaagaggaaatggaaaaagataaacgcgtatttgtgcttggggaagatgtcggcaaacgcggcggcgttttccgggcgacaaaagggttatatgaacgcttcggtgaagaacgcgtcattgacacgccccttgcggaatcagcgatcgctggtgtggcaattggcgcagccatgtacggcatgcggccagtcgcagaaatgcagtttgctgattttattatgccagcttttaaccaaattatttcggaagcagccaaaatccgttaccgctccaacaatgattggtcatgcccagtgacgattcgtgctccttatggtggcggcattcacggcgccctttaccattcgcaaagcattgaagcactgttttcaagtacgccagggctgaaagtggtgatgccttcgactccttacgatgtcaaaggtcttttgaaagcgtcgattcaactcgatgatccagtattgtttttagaacataaacgggcttaccgattaattaaaggcgaagtgcctgaagaggaatacacgttgccaattggcaaagctgatgtaaaacgggaaggagacgatgtgacggtcattacgtatggattggctgtccatttcgccttgcaagcggctgaaagactagaaaaagatggaatttcgacccatattctcgatttgcgtactgtttatccgcttgaccaggaagcgattaaagcagcagcaagcaaaacaggaaaagtcttgcttatcacagaagacaataaagagggcagtgtccttggtgaagtagccgctattattgcggaacattgcctatttgatttagatgcgccaattgagcgtctggccgggcctgacatcccagccatgccttatgcgcctacgctagaaaaagaatttatgattaaccctgataaagtggagcgtgcgatccgcaaacttgctgagttttaaggaggtagaaccgtggcgacaaaaatgacgatgcctcaattaggcgaaagcgtaacggaagggacgatcagcaggtggctagttggaccaggcgacaccgtccaaaagtatgagccgattgctgaagtgttaacggataaagtgagcgcagaaattccttcctcctatacaggtacgattgaacagttgcttgttgacgaaaatgaaacagttgctgtcggcgttgacatttgcaccattgtagaagaagcgagcagcgaggccgaggaaagcaacaaggaaatcaaaacggaacaaaagcctaatccccctgcgaaagagcaaacaaaagcggaacctagccaaaaaagccgttattcgccagctgttgtccgattggcccaagaacatgggctcgaccttacgaccatttctggaagcggcagaggcggacgcattacaaggaaagacgttgaagcttatatcgctggcaaccatacaccggagccgcaacaaccgccagcgcaggcaaagcaacaggaacccgttcgcagcacaccttctcaagcaatagcagcccacgaccaggaaattccagtcacaggtgtacgcaaagcgattgctgaaaacatggttaaaagcaaaatggaagtgcctcatgcttggacaatggtggaagtggacgtaaccaatctcgtcaagctccgtgataagaaaaaggccgcatttaaagaacaagaggggatttcgctaacgtattttccttttttcatgaaagcatgcgtcgaagcgctaaaagaatttccagaaatcaacgcccaatggaacggcacaaccatcgtccgcaaaaaagacatcaatctttcgttagcggtggcaacggaggatgctttgtacgttcctgttattcatcaggccgatgagttaacaataaaagggctggccaaaaaagccgatgaattggcgaaaaaagcgcgcactggaaaattgactggagccgacatgcaaggaggaacgtttacgctcaacaatacaggctcgtttggatcaatcttgtcacagcccattataaacagcccccaagcagcgatcctttcagtcgaatcaattgtcaagcgccccgttgtccgcgaaacggaagaaggcgacgtcattgcgattcgccatatggtcaacttgtgcttgtcgctggaccaccgtgtgttagacggcctcgtttgcggccggttcctcgcatcgatgaaacgtcggttagaacaaatgaacgaggattcgacatccatttattaaccaagtagttcctgggcagcttaagtctacaaaatggggaccacggaaacgcattgcttgtgaaataaaagcgagcagcttacaataaggtcagaacaaaaaggagggcgaaacatgcaacagtttaatttttttatgaatgacgtcgtccaagaggcgcgcaatgatatggttcacgctggttatacggaactaaaaaccgctgaagaagtcgaagaggtattaacacaaaaaggaacaacgctcgtgatggtcaattccgtatgcgggtgcgcaggtgggattgcccgcccagcggcagcttatatgaaaaattacgaaacacaacctgatcgttttgtaactgtatttgctggccaagataaagaagcgacggcacgggcgcgtgagttctttacaggatatggaccatcttcgccttcatttgcattgctaaaagacggccaaatccaaacaatggttgagcgccatgaaattgaaggccatgagccaattgaagtggtgcagaagctagaacaggcagtcgacacgtactgcaaataagccgttttggcatagtcagacatcgagcaaaaacgcttatacagaactcataagcgagtacgctgaaacggtgtgcatagggcctttccttacaagggaaggcctttatttttgctgtaggtcaatgcttcaaatgcgcttggcaaacatgaacttaagatggcaagcaagcagtgcatatgctataatggcaaagtgtaaaggggtgtttctagtgcaagcacagtatgaacgaatccaacaatatttaaatatggatgaggaaatttcatttaaagaatttcaaaacttctacaaagaagtgatcaatgaattaagcaaagcccatcaaggaatggacgaggctacattgtggaaagcgctatttgtcgttgaaaatattatctccaatgctgatgggcgcgccaaagagacaaagggagcagaagcaaaaaaatacagcaaaatgtcccagcgcttgcagctctatgcgaaaaatttcggcgtacgactaggcgaagcaggctatacagaagaagacattaatgaacgtttccagcaaatgtttgctgaaggagaagaagcagccaagttgtcataataaaaaagagggagaaatggattgttgacagctccctctcaatcaagtatacttatacatgtcgttaaaatacttacaggcgcctatggtgaaatgggatatcacacgagattccggttctcgcgttgtgggttcgaatcctgctaggcgcgtcttttaaaaaacacatcagtcgatgtgttttttattttggcaaaccgtgatcagaaaagcagacaaaaagcccattctccgtttcgaatgggcttggtctgttagagtaaaccaaccatttttaagccataatcaatgccattttcatgcacaggctttgttacgtagcgggcttgggctttcactttttcaggcgcattgcccattgctactccatgctcaacaaatgaaagcatttctaaatcatttaattggtcgccgaaagcataaacattggccaagtctatgtttgcgcgctgaataaatttggcaatgccatttgcttttgaaccttcgcgaggcagcacatctacagacagtggatgccagcggacgaagcgaagcgctggaaagcgagtttcatagtctttttcttcgccttcctcacaaaagagcaatgcttgatggagcggttgctcgttgtataaatcaggattgtattggggcaagtcaatttttaatgtcttgatgcttttaatcacataagggtggtcttcacggttagaggtatacgtttttgcccccataaacactagagggtgctcctgcgaagacgcataacgctccatctcggtaaatgcgtccatatcaagcgtgttttcgtaaatcaattcccctttaaagacgacgtattggccattaaagcaaatatatgaatcgatctctagttcttcgcgcaattccttaaaaaagtaaggcgcgcgccctgtggcaatggccacttcatgtcctttctcttttaaagcagcgatcgcttgctttgttgattgcggcaggcgcttctcttcatctagcaacgtaccgtcaatatcaaaaaaaatagttgctctctccatccgatcgattcctccttcactctgtcaatgaaaacaatacatgactcgattttgcctgtcaaatgcgatacagggggttaataggcactgctggcgggtaagatgataataaaaggagtgattcgtatgccagcatataaagttgtgctcagttttattgacgggacgatggatgagtggctctttgaagaaaaccccaatttaaaaattagcgagtggacaaagcaacaaacaggatgggttaatatccaaggaacgtatgtaaataccaatacggtaaagcggattgagacgattgaaattgatgagcagacggatcgataactttttacttctgcccttaaggcatgtatactaacaagaaaacgggtatgaggtgaaaaggttggaagagcaagtcacagaccggacgagacatcgccatacaacagataaagcaaaattgcaaaaccgcttaaaacggattgaaggccaagtgcgcggcgtccaaaaaatgattgaagaagaccgctattgcgtcgatgtccttgtacaactttcggcaatccaagccgcactgaaaaaagtaagcatgcatatgcttgaagaccattccaaacattgcgtggcagatgcgattaaaaaaggcgacggcgacgaagccatttcagaattaatggatatcatcagccgcttttcaaaataagcagctgattttttgtgcaccctatatacctaatgggggtattatgttatgctaaatagaacaacgaaaaggagtgagtaggatggcaacaataaccctttctgtgtcaggaatgtcgtgcaaccattgtgtaacagcgattcaaactgcggttggcgaactaaacggcgtaaaagaagtcaatgtatctctcgacaaaaatgaagtagccgtttcctacgatgaaacagcggtggctgaagacaaaatcaaggcagaaatcgaagaccaggggtacgaggtcaattaggctcctggaggcaaaaaaaaccgcagcttgtccgctgcggttcgttttttactccatttcctcccgaaggagagaaaagacgagttggtcgacgtaacggttgcttttatataacgctccgcgcaacctgccttcctgcatgaatccaagtttatgtaaagcatgaatagaacggtcattatccggttcgatataagcctcgactcgatgaagacggcgtgtccgaaagccatccgctaaaatacaacgcaatgcttcggacgcataacctttgccccaataaggtttcccaagttcatagctaattttcgcactatggtgttctgtttgaaaggtttcaaacccgcatgtgccaataatgtgacccgtgtcctttagtttgattacgtaccgcgaagcttttccttctgccatttctttcacaatcgtgcggatcagcgaacgcgcttcatcaatcgtccggagtgtgtcaattttcatataccttgtcacgcgcacgtcagaccaataaggaaacaacgcttctgcatcaccttctaaaagtttacgcaaaaccaagcgaggggtttcaaaacgactttcactgtccaccagtggtcaccatctctctctttatgctttttttcatattttagcatgaacgacacctacttgcacgctcttcggcaagtaatttaacagttgacttctatgaaaaaatcggttatagttataaatgtccaagagatgcattgcttatacatactgattggatccgttagctcagttgggagagcgctaccttgacagggtagaggtcactggttcgagcccagtacgggtcatctgttgaaacccttatgtgataagggtttttctttttgttatgaaccgaaagtaacctcaaaaaatattatcggggacaaattggggacgaactattttactcgttttaactgtggctttgaatgagttgtggaagtttcattgtttcgagcgaatttatcaaacacaccatactaatgtgcgataacctccacaaacagctcttcccacccttagggatggcttttttcctcctgatctacacttgggctaaacaacgaatgatttaattgcttttattaaatatctttttgactaatagggttaattgttttaataaattttgataaaattcttcaaaatactttgcgacgaataaacgtactagataaaagaaaacccctactataccaataactagaagtaattgaaatcctgtgcttatagcatccaactttatcacctatttattatatttcataaaaagagtctctaatttactaataaagaaattgtcatttaatatatatcataaggttactttacttttaaaccctgctttaatagcaaagttgttttttgttaggtggaatgaaaagaaaatttcgaaacctttacccaccgtagtcaatccacttattgtatcatcgctaataccctttagccaataatcactatggaaattactatcaagtcattaactacccactctataactacggttttgcctatactgaccaatcactatccttcacgggctatcctttatgaaaggattcgctctaatgattaaaggcactgcacatcacacagtatgcctcgtattaatcgttcgcctaacagagtcattatgtgggccgtactcgaattctagttttctcaagtgaatccctatggctttgtctgttgatcggtttgcgagattggcataggccaaactacatttaactataaaaacgcccccgaaacgactttcaggggcgttaacacatgcctctctttttctaaaacccagccttatactgagtaggagcctcaacaggaagctgtaattcagacgcagcgccaagggcccagtatgggttggctaacaggccgcggccaacggcgatgagatcggcttcttcattgccgattacggcattggctaaaacagggttttcgaggcggccgacggcgatgacagggacagatagtgcctgtttgatctgttttgccagcggcgtttggtaacctgcgtggcttccaggcagccctctagagccgattggcccttcgccgccagagctgacgtcgaatatgtcgactccttcgtcttttaaaatctgtgagaagcggatggcttcttctatatcgtagccgccatcgacatattcggttgctgaaatacgcatcaataaaggcatgctgtcggggatgacgcttttgaccgcgcgaatgacttctttggcgaagagcgtgcggtctttaccgtaacggtctgttcttgtattcgtatatggtgaaaggaattgatggattaaatagccatgggcgccatggagttcaatcgcgtcaaatcccgcttctactgctcggcgggctgctgccttaaacgtttgtaccatctcagcgatttcgttctctgacagcgctcgaggggttttgtatgtttcgtcaaatgcctgggcggatggcgcaacgggttcaggtgcgtcttccgcttttctgccagcatgggcgatttgaatggcgattttggcaccatattggtgagctgcatcgacaatcggcttaaacgcatcgcgatgggcgtctgaccaaaggccaaggcaataatcgctaatccgcccattcggctcgacattggtcatttccacaataattaggccaacgccgccaattgctctgctcgtgtaatggtgcaaatgccagtcagtcggcattccgtctttgcctgtagccgaatattggcacataggcgacatgacgacacggtttttcaacgtaagctctttcagttgaaagctgtccattaagtttggcaaaagaacccctcccatttttcgtttgttcaggcttatcgtaaagagatgttgcccgcaattcaagcaaaatgcttgcaagggggcgtttccgtaaggttaactagaatctatagaagctatttttgctaaagggcgaggctagtggagcgacatgctgcggttggaagcgtgccttttggcgaagaggaggagagcgttttgcagaaggaattacataagcagtttacaacgatgattgctgaaccacgtgttcaagaagggttggcttttttaaaaaacgatgacaggcaaacgttgcatgaacaaatgacgatcgctgaaattcccgctccgccgtttcaagaagaaaagcgggccaactatgtgcaagaacagtttaagaagcttggtttaacaaacgtaaagcaagatgaagaaggcaatgtctatgggctttggcctggaaaaaaagacgtgtcggcgattgtggtgtctgcccatttagactctgtcttttcaaaagagacggatgtcaccgtaaaggaaagggacggtgtctattatgggccaggcataaccgatgatgcccggggcttggcggcattgctgtccgttattcgtgctttccaacatacaggtattcagacggaggcgccgattgtttttctagctacagttggcgaagaaggacctggcgatttgcgtggtgtaaaagcatttattgatggaaatgctaatattgctagttttatttcgattgattcggtttctcctgaagaaatcatttaccaaggcactggcagtttccgctatgaagtaacgttttctgggacggggggccatagcttccagcattttggcacgccgagcgctgttcacgcagctggccgggcgattgcggcgattgcttcgttggatgtgccggaaacgccaaaaacaacgtttaatgttggtgtagtggaagggggaacgatcccaacagctattgctgaaacgtgtacgattaaattggatcttcgttccaatggccgagctgaattggatagcattgctgaaaaagcgctcttgttgtgtgaaaccgcctgttcgcaagaaggagaaggcgatcaaaccattcgtttatcttcgaaaaaagtcggcgatcgtcctgtgggtgttcaatcagctgactctgaaatcgttgaaatggctgttttggcaacagaagcactcggcctgactccagagttagcaccgccaagtagcacagatgccaattatccgattagcaaaggcatccctgcgcttacccttggagggggcggagagggcggcggttaccactcgctgaatgaatggtacaaaccggtgaacagttatttagggccgcaacgtgtatggcttgtggcgttagggcttgcccgggccataccgggaagtcaaaacagctgatggcattgttttgtgagctatgtaaagggtatagaaaaaacagatagaggaaaggtggtaggtcaagtgagagtacttgtaatcggtgcaaacggacaaattggcaaacagcttgtcgaaaagattgaacagcaatcgcctcatgaagcacgggcgatggtacgttcaaaagaacagttggaatcgtttcaacaggcaggagtagacgctgtgctggcgaaccttgaaggaccaattagcgaattggctgaagcggcaaaaggctgtgacgcaattgtttttacggcaggttctggcgggcacacaggcgcagataaaacgatgatgattgatttggatggcgcgattaaatcaatggaagctgcaaagcaagcaggcgtaagccgttttgtgattgtcagcgcgattggcgttcaccaccgggagaaatggatgtcctctgccccttattatagcgccgctaagcattatgcggatgaatggctaagagccagtgggcttgattatacgattgttcgtccaggcggtttaacgaatgaaaagggaaatcagaaaatcaacgttgcggtagatttacagcgtggcaacattcctcgtgaagatgtcgcgaatgtccttcttgctgtgttagacatgaagaacacgatcggcaagtcgttcgatgtggttagcggggaagaagacattgaagctgctctttcttctctataaaacaaaaaaagggtctccagcgcaatcgctggagacccttgtcttttatacattttctccttttgctgttggttcctctggggcatttaaacggaacaaacctgcttctattgccgagcggacagcaatgtaaacaaaaggcccaaaaatcaatcccatgacaccgaagaatacaaaaccaaagtacatcgacagcacggttggcaatgcatttaaaccaattgagtcacctaaaacttttggttcaatgatacggcgcaaaatcaacagcacgagggcaagcaccatcaattgaatgcccattgccgtattcccaagtatgataacgaccaagccccatggtactagaataagggcaggtccgacgtacaatggaataatgtcgactacccaaatcaaaatcgacataatcaaggcagagcttggagcaataaataataagctgatataacaggctaggaagacgccgatgcttaaaataaattgcgctttccaatagcctaaaaatactttgcccatgcgtcgaaaaacgaattgcaacttttgtgacgtttcgtctttaaataaattgaacgtgttgctgagcagacgcggcaaatcaaggctaaataagaaaagggtgatgatgtatacaagagtaacaaacagcaagttaggaatcgattgaagccatgctgcaatcgttgtaatgactgtggctgtgaatcctagcacggtgtcaacagctgtctcagaaaggcgttgcagttccgcaacaatggccgctccttgaggaatacgatccaacgtatctgtgaagtcactaataagcttgtcagcgaactgctggatttcaaatgcatattggggcagctgtaatgtccaaccataaatagattcaattaaatagcgaaccgttatgtataaaagaacaccactgacaaacaaaaagctcaaaaacacaatcgtcaccggcaagagccgtttttcttgtttcatcttcttctgtaaaaattttacgaatggctcaaacaccatcgctgttagcagcgccagcaaaatcggcataaacgctgaaagattaaagtagacaaataatccagcggctgcaatgacaacaatcaaaaagattttcttcacgagtgaacggttcaactattgaaaacctcctacgcatacaaaacaaatggaaagtgctcctagatatgagaacatccttttaaaaaaagaatgatcgacggacaaaggtgcctctttccattatagcttaaaccgtccaatctaaaaacgaaaagcactggaatcacgcagaaaatttttttgctgtttggttggctcagactgtagacaaacactcccatacgtcattgtttgacgagtgttttctaaccgccgagtcattttgatgatttgcgtttgcgtaacacggtaaaaatgacgagcgctacaataaaaaggccagcaataatgatagaaagccaaagaacagacgtgccagctgtgtttgtttcatcctctcctggtccacttgcttcgtggtcacgatcttgcttcacttcgttttcgtttgcggcattttcttccgctatgctttcatcctcaggagttgtttcttcctctgcatttacttgaaacgaaaaagatccatccaaagaatggccgtcgtcgccaatgttttgccattcaacggtgtatgccccattgcttagaggttcctgcaaaatcgctatcatcgatgtgttatctacatcaatggactcgatcgctgcctcttcatctgtgtcggtgtttgtgatcgtcatatccgctgtgccaattccgccatcaaaagaaacttggacttccgtaacaggttcattgacttcttcattttcaccaggtgttgacgattgaaaatgggagtgtgccccggctgtgagtgggaaaacaaacaatggcaacaacagaaaaactgcaagacttaaccgtttaaaaaacatgtaagaatatcctccattcatctttaagtgcgatgttagtataacaagaaattgtgagcacttaatgaaattagccgttgtttataaattgttcacaatgtaaatggactaacaacttgtatgcaagctaggcggtcatttcgcttaataaccatagtatagacaaatgttaacccgttcataagggaccgtgcttctgtcagccgccaatctcctgttcacataaacgattgtttttacgtgcaagctacttccatctggatcggaaagggggatgtctgtgaaacggcagtgggtggcggcagcggttgtgtctttctatttggctgtcaagtgggcaagccgaaaggaggcaatcaaacgacaggcagtgcctcgaaacgaagaattttcaaatgagttttacccgctggatagcgatgggctagtaactagctcgcacattggcaagctgctacggcaactcttgcaatagcctcgtccactagatcatgttaaaatgaagcggtacattttgttaagagaggtttttgccatgaacaccatctggaagaacataacggactatttgattgagtttccgtggatgaacctgctcacagcaatcgggctgtttcttatttttctcctgtttcgcaaactattcacgaagtatttgtttaaagtcattttagcgactgcgaaaaaaaccaatgtgcctcttttaacgcagctgctcctttcgtttgagcggccgttgcgtgtcttttttatcgtgatcggcacttacgttgctttaaatgcgctgggcatcaatatgagagaactggccttactaaacaaagcttatggcagtgtattgattgtgcttggcggttgggggctctataattatgtttccactcatgggacatttatggcgtttgccaaacaaaaattgcatttaagagacgaccatatgctcgttccctttatttcaaacattcttcgtttcgtagtgattgctttgacaatcgttgcttgcttgtcagcgatgggcgtgaacgtaaacggatttatcgctggccttggtcttggcggattagcatttgcgttagctgcccaagaaacggttgccaatttgttcggcggtgtagttattattttggaaaagccttttaaaaaaggggattggatttctacgccatctgttgaaggcgttgtagaagacatcacgtttcgtagcacgaaaatccgcacgtttgcggatgcggtggtgattgtcccgaacaaaacgttgtctaacgaagcaattaccaactggtcggaaatgaatatgcggcgtgtaaactattcgataggcgtcggtcaagaagcaacaagattcgagttgcaaagagccgtggaggagattcgcgaacggattcttaaccatcctggcgttgtccaagatacagtcatggtttattttgacgaatttggtgaatcgagctataacatttttgtatattactttacgaaaacagtcgcttggtctgaatggcatgagattaaacaggaaattaactacgacattctcgatattttaaaggacgaaggaatatctgtcttaaagccaattgttgtgttagatcaacaagatgatgaacagtttcaaaaagctggcgaatcatcttagccgaacgaatagagaacgcttggagccgaggggagcaatgaaggatgcgagcgttcgtctatagtttgaaaccttgcctaacagcaaggttttttagcttagatgcctttaccgaagggcgttttagcgtttcccctttctttcgggacaagagttcgttataatgaaaaggcaatcattcgtgacgtaatttgaaaaagaggaggggcctggctgcgatgccaggtgtatctttgtatgaggtatgtcaacattgaagatgttttgcctggcgcatcccttgggaaagagatattttccatggacggccaggttctgctaagtaaaggggcttctttaacagctaaccatattgcaagattgcgaaaatttggtgtccatatagtgccccttgatcttccagaggaaagcaattttgaggaggaggcggcgtctcctaaaacgcaaatcgattctatttttgaagaagattcccttcgttttattggctatggggaagaggagtggaaagagcgtgtgttagcggtgatggaaaaagtagtggaaaccgctaaagcacaggaatttcttcagtttattcgaaatggaagcgattctctttatgcccacgcacttatggttggccttatttcgactacgatcggtgcccggcacgggtattcagataaaaagctagagcaactggcgatttctgccctgcttcatgatatcggaaaagtgctgcctgcatcctatgacgagcctggcgttgtgcatggttcagaccatacgtggagaggatacaactttttgaaaacggtcgctgagtttggcaaagttgtcgcccatgttgccttatgccaccatgaggacttttcgcaaacaggccatccccgcaaagtggctgcttcggctgtccatgaatttgcgcaaattgtagcgatcgccaacgcgtttgaccatttgacccaccggcgtaacggagaagcattaatggaacctggggaagcatgcgaatttatgttggcttttacgaataaacgttttagccatgtgtttatgaatgactttttgcggagcgtggccctttatccaactggaagccaagtcgtgttgtccaacggcttgcacggcattgttgtaagccaaaatagcggtttgccgcaacgccctgttattcatattttgcatacgaataatggaggacaacaaattaccgtgcaaacgattgatttggctcaagagaatacggtgtttattgaggaaattatctcttaaacgaaagtgttcgttcgtgtgtgttgctgacaacgttggcaacacacgcagactgagcgcttatggcgagaggagatgcgaagaaacgtgtttatgggcaatacgttttcttgcctgtgccacaactattctaaagcataagagcgaggcaaacggacgttttcgttcgttttttgtttttaaggaaggtgttctgatggggatttttttgcaagtcgtattgcccgtttgttccatttttgcagcaggttttttgctgcagcgggcgtttatgctcgacatacgttcggtgtcgtctgtagcaatttatattatgacgccgtgcctcgtttttcgtactttttatactgggaatcttgacgcccaatatgcctatatggccttgtttgcccttctcttgcttgcgtcgttaattgtcattacaaaagggtatgcaaaactgcgcaaactaagtctcagtgaagaaagcgggatgatcttagccacttcctttatgaatgtagggaattacggaacgccgattatattatttgcttatggcgagggtgcctttgacctcgctgtttcatttatggtgttgcaatcgattatcatgaatattttcggcgtgtattacgcagctagaggcaaagccgctatgaaaggggccgtgttagcggttttaaaaatgccagcaacgtatgcaacggttctagcactcggactcaatgtaggtggcgtcgcactgccgccaaacctctttcaaccgattgatatcgtcgcggaggcggccattccgacggtaatgttaattttagggatgcaactagcaatgattccattgcgtgggtttgcgtgggaaaagctgaccgttgcgacagtcatacggatggcgatttcccctgttgtcgcgtttgtgatcgtttcctttttgcctattagcgaaatccttagcaaagtgttgattatatcggcggcaatgccaagcgctgccacaatcgtgatgtatgcggtccagtttgattcagaaccaaaacttgtctcctcgattacgctcgtcaccacacttgtcagtttgttttcactgacgttctttctagcgattttaagctagtccattgcaattttaagcgtgacactttatcataatgacagaacaaaggaggctacatacatgaaaatgatggatgcaaacgaaattattgagtttatttctaaatctgaaaagaaaactcctgtaaaagtttacataaagggtcaacttgacaacctttcctttggcgaaggcgtgcagtcatttataaatggcaacacgggcgtggtctttggcgaatggagcgagattgaagctgtccttaacgaaaatgctgcgttgattgaagatactgttgtcgaaaatgaccgccgctattcagcaattccgctcctcgatttaaaaggagtagaagcgcgaattgaaccaggcgccattattcgcgaccaagtggaaattggaaaaggggccgttattatgatgggggcaagcattaatatcggcgctgtcattggcgaaggaacaatgattgacatgaatgctgtccttggcgggcgtgcgactgtcgggaaaaattgtcacgttggtgctggtgctgtgttggctggtgttatcgagccaccatcagcttctcctgttatcattgaggacggcgttgtcatcggcgcaaatgccgtcattttagaaggtgtccgtgtaggcgctggtgctgtagtagcagctggtgcgattgtaacagaagacgttcctgccaatacagtagttgctggaacgccagcacgcgtgattaaagaaattgatgagaaaacaaaaggcaaaacggaaataaagctggagcttcgccgtttaaatgaagaccaataacgtatcgtgtgcagctttgcctaagggcaaagctgttttcataaaaaaggagtggattggtagtggactggattgcgcgggataacgcggcgattatggggacgtatgggcggttgccccttgttatagaccggggagaaggcaattatttaattgatgagaatggcaaatcctatttagacttaattacaggtcttgctgtcaatgtggttggccactctcaccctgaagtgataaaggctcttcaagaacaaggtcaaaaatttctgcatatttccaacttgtatgtaaacaagccggcggttgagcttgccgaacaactgagtgaggctacgcttggcggcaaagtgttttttgcgaattccggcgctgaagcgacagaggcggctgttaagttgatccataaatggagcatggcacaaaagacagcgaaacgaggcattgtcgttttaaaaaatagttttcatggccgaacgttaggcgcgttaaaactaacgcggcaaaaaggcgtctaccaagactttccgaaacatgatttgcctgtctatgaagtggagagggaaaatgtcgatgagttgcgagcagtcatcaaaaagaacaagcctgctgcactgcttatggaaccggtgcttggctcagggggagtcatcccattatcccattcatttttacaagaagcacaggcgttatgtaatcaggaaggcatgctattttgcatggacgaaatccaaacgggtatggggcgcacaggcaagttgtttgcctacatgcatgccgacttaagcccagacgttgtcctgtttgcaaaaggagtaggcggagggctgccacttggtggcatcattgtcaagcaggattggagcgggttgttcgcccctggggaccacggtacgacgtttgctccttcgccattaagctgtgcgctcggccttgccgtgctccgtgtgctccagcaacaaggcgtcctcactgctagccaacaaacagcagcctacttgcatgatacattaacaaagttgcaacgggaatttccaaacattttagaagcgttccgcggcaaagggatgatgattggcttgccgaccaaattaacggcggaaaacacgaaaaaacttcaacaaatgatgatggaacaaggggtgctcattgacgtcacccaacaaacgatcgttcgtttgcttccgccacttacgcttacaaaagccgaagtcgacacgtttgctggccacttccgcaacgcattggcgcaaattgacggagtggtggcatcatgaagatgaacgatctcattcacatacggcgtgcttttcatcaaattcctgaactcggatttaacgaatttaaaacacaacaactccttttagacaccatttcaaacatggagcaaacgcgcctgcaaatcaaaacgtggaaaacagccgtgtttgtccgcgtcgaaggcagacaagactatacgattgcctatagagccgatatggacgggctgcctattaccgaggaaacaggctattcatttgcctctaagcatgaaggagcgatgcatgcttgtgggcatgacttccatatgacgattgcccttggcttgctagaccattttgccagccacgaaccagaatgccatttgctgtttatttttcaaccggcagaagaagggccaggaggagcaaaaccgattatagaagcagatgtactaggtgcttggcagcccgatgaaatttatgcactccatattgacccgaaccttcctgtcgggtcaatcgccacgaaaccagggttattgtttgccaatacatctgagctttttattgattttcagggcaaaggcgggcatgcggcttatccccatacagcgaacgatatggtggttgcttgtgcccattttgttacacaagtgcaaacggtcgtcgcacgcaacattgatcctcttgattcagcagttgtaacactcggcgttatagcaggaggcacgaaacagaatgtgattgccgcaacggcccggttagaagggacgattcggacgctgtcgatggcatcaatggaagttgtcaaaagcaggcttgaagcgattgctgctggtatagaggcaagttttgcgtgcaagattgcgattgattacggcgccaattactgcgaagtctacaatgacccagaattggcagaagcgtttgccgctttttcaaaaacacgaaaaggcattacgtttgtagaggcagaagaagcaatgacaggggaggattttggctactttttaaaacaataccccggcgtcatgttttggcttggcgttgatagcccgtacggcttgcatgatagccgcctgcaaccaagcgaagaagcgattgggattgccatcgagcatatggtcgcctttttaagcgcgaaaaagccccgctaataagcatggtataaagccttcgtttgcagcgcatactaatgtggaaataaacgagggggtgccatatggctaaaataggggtacaatccaatttgtcagatgtacagcaagagcttcagtctaaaggctatgaagttgtacaaattgaaaatgaacaagacgggcaagactgcgaatgctgtattgtttctggaagaaatgcggatgttgccggcatcagtgttcctgggcaaatgagcattatccacgcagaaggtttaagtgcagaagaaatcggccaacgtgtcgacgaaattgtgactcaacactaaaaaaataccagcaaaagctggtattttttttattcattttctgattgtgaaaaggcatcgtatcgttgccggatcgcttggcggatttcgcgttccactgcccattgctccatattatccgttttggcaatcacacggattgtcgtcgtcgctaaatcgtcgctttcgacgcctaacacgtcagggccagatacaatagctggatggctaaagtgttctagtgcctctttcaccattgctagcgattcgtctaatttttgcccagctgggatggaaatgtcgacgagggcacgcatattgccgcgggaatggttgtccacattggcaatgttgcggtttggcacgtagtggagtgtaccgtcaaaaccgcgaatcaacgtcgtgcggaagccgagttcctcgacaatcccttcaaccccgcccgcagtcacataatcgccgacttcaagctgacgttctaacaataagaaaaagccagtcaccacatcgcttacaaggccttgggcgccgaaaccaacggcaagccctacaacacctgcaccagctaaaatcggccctaaattgaaaccgagtatttctaagatcgtcattgctacaataaacaacaacacataagaaaatacattttgagtcaggctttttaacgttttcagtcgagcttgtgaggcgcggatagaacggttaaatgccccggcgatcagtttacgccctaaggcgcggacgatgaaaaaaatgacgaccacaagcgcaattttccaaacggtatgcacaagcggatgggaaagccattcgttaatagtactgttcactgattacccgctccttcctcaatatcattgctttgttgagaatagcataaatcgacaaatctttcaaagaccgctatgtaagtaaggcaggaatgtgaagatttatgtttctagattaaattcattctcaattaacattgactccaaaaagcaagcccgttataataatgattgtattggatttgcaaaggaggagttagacttatgactgaaaaacgtatggttggcaaacaagcacctcgttttgaaatggacgcagtgttgccgaacaaagaatttggtaaagttagcttagaagaaaatatgaaaaatgacaaatggacagtgttgttcttttatccaatggatttcacgttcgtttgtccgactgaaattacggcgttgagcgaccgctacgacgaatttgaagacttggacgctgaagtaattggtgtttctacagacacgatccatacacacaaagcgtggattaatacgtcacgtgatgacaatggattaggcgacttggcttatccacttgctgctgacacaaaccatgccatttcaagagagtatggtgtgttaattgaagatgaaggtgtggcgctacgtgggttgttcatcattagcccagaaggtgaattgatgtattctgtagtgaaccacaacaacatcggccgtgacgttgatgaaacgttgcgcgtgctacaagcgttacaaactggcggactttgcccagcaaactggaagcctggacaagctacgctttaaaggaatagtggcaagggcctagcgtgttgttaggcctttgtttttcggaaaaagaataagtttcgagcgtgtgcgctttttataaggagggaaacgagatggctttgaaactacggtcggaaatgccagaattgacaggcgcgactgaatggctgaatggagaagtagcgaaagaggacttaattggcgacaaaccaacgctcatccacttttggtccattagctgtggcttgtgtaaagaggcaatgccaaatgtcaatgaatttcgtgaccaatacaaagacgagctaaatgtcattgctgtccatatgccgcggtctgaaaaagacttaaacattgatgagatcaaacaagttgccgatgagcatgggatcacgcaaccaatctttgttgatagtgaacataagctgacagatgcttttgaaaatgaatatgtgccagcttactacgtgttcgataaagaagggcagctgcgccacttccaagcaggaggcggcggcatgaaaatgctgaccaaacgtgtgaaccgagtactcggcattaaagaagaaaaataagcaaagacgcgcctctttttaaggaggggcgtctttgcttattggccgattgtttggtacagtcaagttacgattgagcagcggagggccattatgaaaaaacagtttgcgattatcggcttaggacgcttcggaggaagtgtcaccaaagagttagtggagcaaggcgctgatgtactggccattgatagcgaccgaaccaaggcagacgaatttcgtgacattgccacacaagtggtgatcgccaatgctacagacgagcaagtattaagggaactagacatcccgttgtatgagcatgttgtagttgcaatcggcaatgacattgaagcgagtattttggcaacgttattattaagcgaaatgggcgttaaacacatttgtgtaaaagcagaaaccgatcatcacgaaaaagtgttgaaaaaaatcggcgcacatcgcgttcttcatcctgaacgggaaatgggcgcgcggcttgcccatcaccttttatccgccaacattgtcgattacatcgagctatcgtctcaggatacgatcattgaagcagtagcaacgccttcacttatagggcagacgatacaagatcttaacatacgcgccctttacggctgtacgattattgctatccgcaggcaagggaggttgatggctgctcctcaggccaatgaagtgattcaagcaaaggacgtacttgttttgctcgggccaaaaaaagccatttatgcatttgaaaaagactttattgccaactaatagctgctaaacaagcctgctgacaatgaaagccattgtcggcaggctagttgttatacttccatgataatcggcaaaatcatcggtttccgtttcgtacgctcgtacaaaaatggtccgagaagctcggtcatttcgtttttaatttcagaccactgagacgttttcttttccatgacgctgtttaaatgtttagcgagcattttttgcgcctcatgaatcaaatcgcctgattccctcatgtacacaaaaccgcgggaaatgatatctggcccagctgtgactttgaattccttcatatctaagctaacgacaacgatgactaagccttcctctgagagaattcggcggtcacgaagcacgatattgccaatatcgccgatgccattcccatccacataaacagagccagacggaattttgccgacgacccctgcttcattaggatggagcgcgagaacatcgccgttatccataataaaacagttttcttctttaacgccacagtcttgagcgaggcggttatgagtgcgcagcatccgatattcgccatggatgggtaagaagtattgcggtttcataagccgcaacatcagtttctgttcttcctgcccgccgtgcccagaagtatggatatcactaagtgggccatggatgacatttgcgccaacacggtatagttggttgatgatttttccaacgctaagcgtgtttcctggaattggcgaagaagaaaacacaaccgtatcccctggaataatttgaatttggcggtgtgttccaaaagctatccgtgatagggctgccatcggttcaccttggcttcctgtgcaaagaatcgttactttgttatcagggagtttgtttaactgtgagtgctcaatgaacgtatgtttaggcgcattgatgtagccaagctcttggccaatggtaatggctgattccatgctgcggccaaatacacatactttgcggccatagtcaactgcggcctggatcacttgttgcaagcgatggatattcgaagcgaacgtggcaaaaataatgcgcccatcgactttttggaaaacattgttgatgctttcgcctacttttcgttcggacattgtaaaagtcggaatttcgctattggtgctgtcagacagcaagcaaagtacgccttcatcgccgattttcgccattttcgttaaatttgccggttcgccaacaggagtaaagtcaaatttaaaatcgcctgtatggacaatgtttcctggtggcgttttgacaacaacgccgtatgagtcaggaatgctatgggttgtccggaaaaacgacaccgatgttttcgtgaatttgacgacttggtcttctgcaatctcgtgaagcttagcgctgcgtagcaagccgtgttcttcaagttttccttttaagaggccgagtgcaagcttgccgccatagacatcaatgttgatttcccgcaacaaataaggaattccgccgatatggtcttcatggccatgggtaataaacaagcctttgattttgtcccgatttttgattaagtacgtatagtcgggaatgacgtaatcgatgccaagaagctcgtcttgaggaaacataattccagcatcaataagaataatttcgtcttggaactgaacaccgtacgtatttttgccaatttcgcctaagccgcctaaagcgaaaacagctgtttggttgttttttacttgtttcatggttaaatgttcacgaccttaaagtcgctgtttgcctgctcatattctaaatatgctccagttacagctgttacgtattcaatgttgaagttttgcttggccaacttaaggcggacgtctgcttcgctttcgccttctatgtacaatgactttgtccgttcccgtacaggcatctgcgcggcatcttcttgatagtaaactttaaaaatcattcttacctctcctttaaatgtagtccttccattataatagaagttcgcttatatttgaatggtttcctttattccctgctgcaatgataaaaagccaacctgattgaaaggctggctttcttagtttttccaagttcgacattcattaaacgtcaagcaataatgacttcggcaggaggtttcggcaacctttgactagttttttccgccactttcttaacatcccgttccactccttttcaatgcccttgtacatgtagtgtatgcacgtaggcattgaagaatcgagggaattgttggcagctgttaaagcgcaaatccaggcaatggttttttgaaagggtcttcgagtccctcaatccggtcgtaaaacataatgccgtctaaatgatccaactcatgttgaaaaacaatggcaatatatccccgcaagcgcatacgcacgtcgttgccttcatggtcgactccagtgatcgttaaacgggcacgccgaggcacaaggccgggaacgtcacggtcaacagagagacaaccttcgccattttcaagttcattggtttcaacagaatggctaacgactttcggattggcgattcccatgctgtagaggttgccgttttcatctgtggcatggatggcaaatagccgtttagaaatgccgatttgtggcgcagctaagcctacgccaggacggagcccgtatttttccgcgatttcagggtcttggctgtttttaataaactcgagcatgtcgaccaatgtttgcttgtcttcatctgttaatggcaattcgaccggctcagcgactttacgtaaaattggattgccttcgcgaacaatgtcgtccatcgtaatcatatgtaccactccttattttctctatatagtttaaggatattcagtagcaggcgcaagtagaaaaagcgagcagacgacaggctgctcgcacatatggcttgcgttatttgtgagggccaggtcctgggcctactgggccgcactgttcttcgccgccgtagccgaaccaagatgcgccgacaatgatcaagagaataaacagaacgacaattaaggcaaagcccctaccgccgccgtagccgccgcagccataaccataaccaccataaccaccataagcttcagggccgtagccgtaaccaccatatccgtaacccataaaaaaattcctcctttttcgtcatcgcaaatatgttaggcgattcaatacacatcatatgcctccacctaataaacgattggatattcgcccagtttttcagaaaatagttgaagcatcttgccaaatttgaccatgtccgataatgtggtatttaggcgaaaaaagcttaaatcgtcgaaggaggagaaaatgtgtcgaagacaaaacttgcgacaatcggcgtaggatcgattttattgctgactgcctgtggcgaaaacgcaacggaaaccatttatgaccatttagaaaatgctgcgcaaattgaaaaagaagggtttgaagtgcagcaagaaccgctcgttcaggccgaggaacatgaggctgacttatataatcaaataatggaactggacatggaacagttcgaagaaatcgtttctctcgctgatgaggcgattgcgtccatcgaaacaaggcgagaactgtctgccaacgagaaacaaagcattgaagaagggtacgaagaattttcagctgcaaatgaggcgttcgctgctttggaagaggaaccgcttgctgaattgggacaaactcttaaagaagcgatggaagctcgctatgaaagttatcaaaaattgcatgaagtgtatgcggagacgcttgacctagacgaacaactttacaatttgttaaaaacagaagaccttgatgtcgagacgttaacaaaccaagtagaggaaacgaacgccaaatatgaggagtttcaagaggcgacggacttatttaatgaacatacaaatatatacaacgacgcaaaacaagcattttacgaagcgtcagatttagatgtgcgctttgaataagcgcacatcttgtatctgtattagttcaccgtctcgatattgtataacacagtttcattttcttactaattaatcatttgttttagggagaaataaagaaagcaagcaaaaggattgacgcattgtttccttttcatgtagacttatgtcataaggtgagttgtactactgataagcaattttttttgtaacagttgaacgaatgctcagccccgtatcaatggcttgtgtaaaaggggccagccgcggtaatgtatcttttaggtttgggcatgctaatggggattttatagatgcattaggtcatggatataaagaacaattaccgcttactaacgaaaggattggtggacaaattgagtacgaaaacaattgagcaagtcgaagaacaatttgaaaccttccagatcttgaatgaggaaggcgaaatcgtgaatgagtcagcaatgcctgacttaagcgatgagcaattacaagagttaatgcgccgtatggtgtatacgcgcatctgggaccaacgggccgtttctttaaaccgccaaggccgcttaggcttctatgcgccaatgggcggtcaggaagcatccatgcttggctctcaatttgcccttgacaaagacgattggattttgcctggctaccgggacattccgcaaattgttttccatggcttgcctctctatcaagcgtttctatggtctcgcggccacttccatggcggccaatttcctgacggcctaaacattgctgtgccgcaaatcattattggcgcgcaaattgtacaaacagcaggggttgctctagggctaaaacggaagaaaaaagacaacattgtcatcacgtatacaggcgatggcggatcttcacaaggggacttttatgaaggcatgaactttgctggtgcctacaatgttcctgctgtttttgttgttcaaaataaccgttttgcgatttccgttccagtggaaaaacaatcagcagcaaaaacaatagcacaaaaagccgttgccgctggaatcgaaggcatccaagttgatggcatggacgttcttgctgtttacaaagcaacaagcgatgcccgcaaacgtgcgcttgctggcgaggggccgacattgattgaaacgctcacgtaccgttatggcgctcattctacttctggtgacgacccgactcgctaccgtacttctgaagaagaagacgaatggggcaaaaaagacccacttattcgcttccgtaagtttttagaaagcaaaaacttgtggagtgaagaaaaagaaaacgaagtggttgaacaagcaaaagaagaaattaaagctgcggtgaaagaagcagacaaaacgcctaaacaaaaagtaactgacttgcttggctttatgtttgaaaaccctcctgtaaacattcgtgaacaattggaagagtatacggcaaaggagtcgaagtaacttatgggtaactggacaatggctcaagcgatcacgaacgcgcttgctaatgaattaaaaacgaacgaagatgttctcatattcggggaagacgttggccaaaatggcggtgttttccgggtaacagaaggtttgcaaaaagaatttggcgaagaccgagtatttgatacgccgcttgccgagtctggaatcggcggcctggcaattggccttgcactgacagaccatcggccagtaatggaaatccaattctttggttttgtgtttgaagtgtttgactcaattgctggacaaatgtcacgctggcgttaccgcactggcggaaaacaaacgatgccgattaccgtacgttctccattcggcggtggcgtaaaaacgccagaaatgcactctgattctctcgaaggtttaatggcgcaaacgccaggagtaaaagtcgttattccatcaaacccttatgatgcaaaaggattattgatttctgccatccgcgataatgacccggtcgtgtttttagagcatatgaaactttaccgttcattccgccaagaagtgccagaagaggaatacaccattgagcttggcaaagcggatattaagcgagaaggaaaagacatcacgattgtggcctatggagcaatggttcaagcttccttgaaagcagcagaagagcttgcgcaggaaggcattgaggcagaagtgatcgacttgatgaccattagcccatttgacgtggaaaccgttgtcgcttcagttgaaaaaacaaaccgcgcgattgtagtccaagaagcacaaaaacaagcaggggtggcttcccatattgtcgctgaaattacagagcgggcgattctttccttggaagcgccggtgcttcgagttacagctccagacacggtttatccatttgctgctgctgaagatgcatggctgccaaaccaccagacgatcgtagaaaaagttaaagaagttatcaacttctaaataagcgattaaaaagaaagcaacgaagctggggaaaaaccagtatcgttctttcttttatagaagatgatttagagttataatgaaggaggcgttttagccgtggcttataaatataaactgcctgaagtgggtgaaggaattcacgaaggcgaaattgtgaagtggtttgtaaaagaaggggatgaagtcaaagaggatgacattttgcttgaagtgcaaaatgacaaatctgtcgttgaacttccttctccagtagatggaaaagtgcttgaagtgaaagtggaagaaggcacgacaagctatgttggcgatgtcatcttagtcattgatgatggctctggcgatgatgacgctgaagaagaaagcaaagaggaagcgccgaaagaagaaaaacaagcagcctctgagcctgaaaaaggacaatcttcttctgaagaaagcgatgaagaagaaggttcacgcgtcattgccatgccttctgttcgcaaatatgctcgtgaaaaaggcattgccatttctaaagtaaaaggatcaggcaaaaatggccgcgtattaaaagaggatgtagatgcctttgcatcaggcgggcaaacggaagaagcagcggctccgaaagaagaagaaaagactgcttcctcaaaaccagcagctacagcacaagctggcggaaacgagcagttggaagagcgcgtaccgcttaaaggcatccgcaaagcgattgcaaaagcaatggtgaactcaaaacatacggctccacacgtgacacatctcgacgaagtggacgtgtcagcccttgttgcccatcgcaaacagtacaaacaaattgctgcagaccaaggcacgaaactgacgtatcttccatatgtcgtcaaagctttgacgtccgctcttcgcaaatatccggctttaaatgcgtcaattgatgacgaagcaggcgaaatcgtctacaaaaagtactttaacgtcggaattgcagcagacactgagcaaggcctcgtagttcctgtcgtcaaagatgctgaccgtaagtctatttttgcgcttgctgatgaaattaacgagttggctggaaaagcccgtgaaggcaagctgtcaagtgcagaaatgtcaggtggatcggcaacgatctccaaccttggatcagcaagaggacaatggtttacgccaattattaaccacccagaagtcatgattttaggcatcggccgtattgaagaaaagcctgttgtaaaagacggcgaaattgttgtgggcactatgctggcactgtcaattagctatgaccaccgcttgattgatggcgtgacagcacaaagcgcgcttaaccaaatcaagcgtttgctaaacgacccacaattactattaatggaggggtaacagatggttgttggagatttcgcacaagaagtagatacactcgtagttggctccggcccaggaggttacgttgcggcgatccgtgctgcgcaacttgggcaaaaagtaaccattgtcgagaaaggcagccttggcggcgtttgcttaaacgtcggctgtatcccatcaaaagcgttaattcaagctgggcaccgcgctcatcttgccaagtcttctgaagacatcggcattcgcgctgaaaacgttgctattgattttgagaaagtccaagaatggaaaggctctgttgtgaaaaagctaacgggcggcgtcgaaggcttgctcaaaggcaacaaagtcgaaatcatccgtggcgaagcctatttctccggtgaagacactgtgaaaattatggatgagaaaagctcaagcacgtacaagttcaaacattgcattatcgcgactggctcaagcccaattgaaattccaaacttcaaatacacagatcgcgttattaattccacaggcgctcttgctttaaaagaagtgccgaaaaaattggttgtcattggcggcggctatatcggaattgagctaacaggtgcctattcaaaccttggatcagaagttgtcgttcttgaaggcacaaaacaaattttgcctggtttcgaaaaacaaatggcaaaacttgttgagcgcaagttgaagaaaaatggcgttacgttccatacagaagcaatggccaaaggcgtggaagaaacggataacggcgtaaaagtaacagccgaaatcaaaggcgaagaaaaagtgatcgaagctgattacgtccttgtgacagttggccgtaaaccgaacactgaggaaatcggccttgaaggcatcggggtagaaatggatgaccgtggctacattaaagtagacaagcaaggccgcacgagcgtgaaaaacattttcgcgatcggcgatattgttccaggtccagctcttgcccataaagcttcttatgaggctaaagtagcagcagaagcgatcagcggcgaaccttcagaagttgattatctcgccattcctgcggtttgcttctctgagccagaattggcgacagttggctacaatgaagcacaagcaaaagaagctggttatgacgttaaagtggcgaaattcccattcgctgcaaatggccgcgctttgtctttaaacgatgctgacggctttatgaagctcgttacgcgtaaagaagacggccttgttattggcggacaaatcgctgggccaaatgcatcagacatgatcgctgaaatcggtttagcaattgaagcaggcatgacagctgaagacattgcattaaccatccatgcgcatcctacgcttggcgaaattacgatggaagcggctgaagttgccctaggcacgccaattcatacattgtaaatagcaaataaaaagctctttaagggttctccttaaagggctttttgcgtttagagaaaagcaatgtgagaaaatctattaagaaaaataaaaaaacagaaaaaaacttgccgaaaaatcattcgtttgtgctatacttatcacaaaatttacctagtactgatggaggataaacatggcagagcctttacttcgactgcaagatgtgaaaacatactttcatttgaaccaatcacgcactgttaaagcagtagacggcgttacgtttaccattcatgaaaatgaaacggtagcgctagtcggggaatcgggcagcggaaaaagcatgacgtccatgtcgattatgggattagtggacgaacctggaaaagtagaggggtcgatccagcttgaaggacaagaactgttaaagcgaacagaaaaacaacttgatcacatccgcggcgcacaaatcgcgatgattttccaggagccgatgacttccttgaatcctgtttttacaatcggaaatcagataattgaaacgatcagaaaacataaacaagtctcaaaaaaacaagcgcataaacgggcagtcgaactgttaaagctagttggctttgcccgcgccgaggaaagcatgaaacaatatcctcatcaactttcaggagggatgcggcaacgggtcatgattgccattgctatatcatgcaacccaaagctgttaatagcggatgagcctactacggctcttgatgtcaccatccaacaacaaattcttgatttaatgttaaaaataaaaaatcagtttcagtcttcaatcctgttgattacccacgaccttggcgttgtcgctgaaacagctgatcgcgtccttgttatgtatgcgggtcaaatcgtggaagaagcgcctgcttatgatttgtttacgaatccgctccatccgtatacgcaagggttgctgaaaagcatgccgaagcttgaagacaacaaagataggcttgaggccataagcggaatggttccgccagcccatcgttttccacaaggctgccgctttgcctcgcgctgtgagtttgccactccattatgcgcagaagcgatgcctgaactagtgaacgtaagcaaaacgagggatgtgcgctgttatttatacaaagaaggcagtgtagaacctgacaagcagcggcttaaagaaggagcgatcagctaatgtccaatgtgctactagaagcaaaagggttaaagatgcattttccgataaaagctggcgtgattagacgtacagtcggctatgtaaaagcagtagatggcattacgttaaacgtctataaaggggagtctcttggtattgtcggcgaatctggttcaggcaaatcaacactagggcgaatgcttttaaggttgcttgatccaaccgaaggggaagtttattttaatggggagcaaatttcaaatctttcaaatagaaaaatgcgtccttatcgccgtgatatgcagatggtttttcaagacccttatgcttcgttaaatcctcgcatgacgattggtgaattgcttgaagagccactgcttgtacataaaacaatgaatacaaaagcggatcggaaaaaacgggctgaagaattgctagagactgttggtttgccgaagtcgtcttacaataaatacccacatgaattttcgggtgggcaaaggcaacgagtcggcattgcccgtgccctaagcactaagcccaaactgattatcggcgacgaaccggtatcggcgttggatgtttcgattcaatcacaagtgttaaatttgatgaaagacttgcaagatgaatttcaactaacgtatttgttcatcgcccatgatttgagcgtcgttaaacatattagcgaccgcgtcgccgttatgtatttaggtagaattgtcgaaattgcacagaaagactctttgtatgaaacgccgcttcatccttacacggaagcacttatatccgctgtgccttcaaccgatgtcacagttaaaaaagagaaaatttccttgaagggagaattgccaagcccggcgaatcctccaaaaggctgtgcgtttcatacacgttgcccacatgcttacgaacgttgcaaacacgaacgcccagaaatgacggagcaaaaggacggccattttgtcgcctgccatctttatacggattcaagcccatcaccagtataatggctcactttaagtgaaggaggtggtgctcaatcaattcaagcaagcttaaatgaacaaagggtttgtttcatgaaagaaaagggggaaattgtgttgaacaaaaaaccattttacacgtttttgctggcaactgcttttgcaggtacgctagctgcgtgcaacagcgatactggcggttcaggcgaaggcactgacggaggagaggccgtagaaggcggcaatgtcaatcttggaatgatgtcaccaccagacaatttattcaatccgattttttacacatctatgtatgactctcatattcttgaaatcactcatgaaggtcttgtccaacaagatgaagaatttaatttcatacccgaattggcagaagactgggaatttagtgatgacaaccgtgagttgacttactttttgcgtgaagatgtaaagtggcatgatggcgaagattttactgccgatgacgtcgtctttacgtttacggccatggccgatcccgattatgcaggtgcaggtgggatacgccaaaactatgtaaacacccttgctggctatgaagactacgtaagcggcgaaagcgacacatttgctggcgttgaaaaaatagatgactatacagttaaatttatttttgaagaaccgagtgtaaaggcactagctgatacatcaatggatattattcctgagcacatatttggcgacgtgccagttgctgacattccatctcatgctgggtcgattaacgctggcgaagtgattggcacaggaccgttccaattgtctgaaatgcttgagaatgagcaatacgtattaaccgccaatgaagattactataaaggcgcgccgaaactagatacgatcacgtggaatgttgtctctgcttctgttgtcgcagggatgttggaacaaggcgagctcgattacgtgcctcgggattttccagctgctgatgtcgatacgattgacgggaatgataatttgactgtttttgaacaagcgcagctaggctatcaatacttaggcatgaaaatcaatcatggccctaatgacagtctaactaatccagattcttgggagccaaacgaaaaactgcaagatgttgagctccgccaagcgattgtgcacgcgatcaatcgccaggaatttattgacggctttttacgtggccacggtgaattattggatgcgccatttccaagtgcgtcatgggcatacaacccggatgcggttgaaggcttagcatatgatccagaccttgccaagcaaaagctagccgatgcaggctatgaagatgtcaacggcgacggctttgtcgaagatccagacggcaatgaactcgttctcaacttagattatccaacaggcaacccagtacgtgaacaagtcgcgcctgtaatgaaagaacagctagaggcagttggcattcaagtcaatttaaatacaccacgtgaggcgccagctcattttgaaatcattgagcaaaacgacacggatgtcgatttattcttagcaggttggtccctttcttctggcgacccagacccatggccaattaatggcggcacagcaggttataactattcgcgtttccttgacgaagagcaagaaaaattgttgcaagaagcggttaatccagaattggcatttgacaaccaagagttccgtgcagaaaaatacggagaatgggcacaactctttattgacaatgcttatacagttccgctttacgctgaaacagaacttcatgtgtacaacaaacgtctggcaggcttgacgatcaaaccgtttaccttcaaagacgagacacatgagtggcacttaaccgaatagcgcgtgtctgcacattgaagcagcttttacagctgcttcaactttcttcaatttgctggaataagagaggtggcccggatgcttaaatatattgtgaggcgtgttctgcagtttatcccaatggtcttcattttatcagtaatcgtgttcttatttgcataccttgctccaggggacgcgttgagtggagaagtgattgacccaaatacgccacgagaagtaattgaggaacgccgggaagcattaggattgaacgatccggtacatattcaatattggagctggctcaaacgggcagtgacaggcgatttagggatgtcgactcatttcaccggtaggtctgtcagcgagctaatcgggcaacggctcggcaatacattctatttaggcgcatttgcgcttttaattacactcattgtgtcgattccaattggtatttattctgcacgtaaaaaatattctgttttagattatgcggcgacgtcatttgcctttattggcctagcgacgccaaacttttttgccggattgctggcgatttatgtgttttcttttgggcttggttggtttccaacacaagggtcgatcggttcccctaatttaacggggtttgatgcttttgtgagccggattcagcatttaattttgcctggccttacacttggtttatcaagtacagcgatttttatgcggtatatgcgctcagaaatgcttgatgtaaaagggagcgactttatccgcactgctcgggctaaaggcgttggcgcaaagtcggttttgtacaagcatactctccacaatgcgatgattcccattattacgctacttggtatggaaatcggcgtgctattgagcggcgcgttcattgtcgaaaccgtatttaattatccaggtatcggcacgttatttttatccggcatggccaatcgcgattatccagtcattatggcgattaacttgttaattggcttatctgttttagtcggaaacttattagcagacatcttttatgcggtggctgatccgcgcattcgacttgattgaggtgaacgaagaatggaaccgagattaaatgaaacaccgagtgtgtcccctccgacgccaacatggtcagaagaaaaaagcgtcagccctacggtcctagcttttcgccggtttcgcaaaaataaattggctctagcgggcattgtctttttatcgtttatcgtgttggtcgctatttttgctgatgtcattgcgacacatgatccgactgcttcccagctcagcaaaatcgaagcgaaagcagatggcgaaaactggttaggcacagacggttctggccgcgataacttttcaaggcttgtttatggcgcgagaatctctcttacggttggcttttttgcaatgttgtttacggtgttaattggcggaacacttggttcaattgctggttattatggcgggaaaatcgattctgtcattatgcgttttacggacattgtccttattttcccatttattttgctgtttatgacgattgtggcgatcctagaacggacgacagtaccgatttttattctcgttatcgcgattacatcctggccgcaagtttgccgaattttacgaggtacgtttctttccattcgtgaaaaggagtatgtgttaagcgcccgaagtatcggctgttccgattggcgtatcatccgcaagcattttttacctaatgcggtcggaccgatcatcgtcaatgcaacgattgtcatggcgacgatgattgtcgccgaatcagcattaagcttcatcggtttcggcgtgcctcaacctacaccgacatggggaaatatgctaacagaagcacaaagcgtccgcttgctacgcaacaatccagaagcttggttgccccctggattatgcattttgcttactgttctttccattaactttattggcgacggtctccgggacgcatttgattcaaaagcgtaatagagcaaaaagagcaaaaccaacgcttttcgcggtggctatgctctttttattgttttaaggctccttcaagccgggcgtataagtctgtgatgtcgtgtttgccggaaatgcgcagtttttcgtcattgcccttataaacaagcatcgctggaaattcatctatgtcataatagttgataatatggcgctcgcttgcgtcacaaatgactaactctgttacctgttctcctaaatcctgttggactgctaataccgcgtcatagtaattggcttcatctgaaagtctgtcaggatcggaaaaaataagcgtaacgggatcctctttctcgttagaatgcagctgaggagacgaaaaggcaggtaaaatggaacagccttgcagaaaaaagatgaaacagccgatgaacagaaggcgtacccctttattttgcatttcttctcctcctttttggttaataagcagtcgcagcaataactgaaatccattttagcataaggaaaacagtctttttctagcgtcataaaaatgtaaaacgactgtgaatcgattgtaaatatcgcaaaaaaagctcctagatcgattgcatctaggagcacaccaagttagtctttttttctgtccttcttcttgtcttttgttagttgccgaagtttttgttgttctttgcgaagcaacatttgttcccgtttaatgcgttcccgttcattgcgcaaagctaggcgctcttgccggagccgttcacggtttactgtcagtgctgctttttcattgcggagttctttaaaaagcgacacaatcattaaaatgataatcacagcaaacggaaaagcaccaataatcgatgccgtttgcagcgcggccaaaccttgttcgcttgttagcagtagtacagcagctgttccggaaataataacgccccacaccaactttaccgcattaggcggatttagaaggccaccagttgtttgcataccgagcacgaccgttgccgagtcggctgatgttacaaaaaaggaggcgattagaatgacggtcagaatggaaacgaaaaaggtcaatgggaattgctcaagcaaggcaaacaatgccatttccgtgccgccagtttgcatttgcccataaagggcacctgtttcgttttcaaaaaagatgctagagccgccaaatacgctaaaccaaaaagcgccgaacaaagacggcagtgcgataacgccaatgacaaactcgcgaattgtgcgccctcgtgaaacacgggcaataaatgctccaacgaatggggaccacgaaatccaccatgcccagtaaaacaatgtccattcttgcacccaagaagattctgggttataaacatccatgctaaaactcatgccaaaaaagttttgggcatagctgccaatgccttgtgtaaaaacgcccattatgtaactggtcggaccgagaagcaacacaaaggccattaaaataatagcaagtcgtacattaaaattgctcaatatgcgaatgcctttgtcgacgccggttgccgccgaaatacaaaagagaattgttacaatggcaatgacaaccaactgaaatacattatcggaaaacgaatttaatgcaggaaacaaatagcgaagaccggctgtaatttgcgcggctccgaaaccaagtgatgtcgccgttccaaaaacggtcgcgaacacgacaaagacgtcaatgaccttgccaagcggccctgtaatgcggtggccaatgagcggccggaatgtcgagctaaataaagcaggctcgtctttacggtactgaaaataggcgagtgccagcgccacaacagcatagatggcccatggatggatgccccaatgaaagatcgcataccgcatcgcctgggcagctgcatcttgcgtgcctggtgcagcatctggaggagcaaaataatgggacagtggttcagccgctccccaaaaaacaaggccgatgcccatgccggctgtaaaaagaaacgcaaaccatgtcatatagctgtattcaggttcttcttcaggtttaccgagtttaatacttccataagggctaaaaattaagtaaatgcccacgcctacataaaaagtggcagagagcaaatagaaccaaccaagttcagatgagataaagccttggatggagtccattacggtcgccatatttttggggaaaaatactccccaaaggataaaggcgcttgcaattgcaacagccgttccaaatactgaagttgtttgtttcatttgtacaatctcaacctttccttgttgtccacaagtcgtcatcataccataggatggcaaacaatccaagggaagatacgccaattttcatcgcaatcgctttatcatacccgcttcattgggcgaataaacgcaatttatcaaaatatatggttggctttccagttgtcggatgaaggcaatctttgctaacatggctacaactgaaaggggaggaagaaataacatgaaaaaatgggtggcagttcccgtctgcttgctcgtgctaacagcttgcggaaatgagtctgataactcatcgcaaacggcgacagaggcaaacgagagcgaaagcgacaacgagcacgctatgacagaagatgaaaatagcagcgaggatcttgaaaagccagaagaaaatgaagtcgaagagcagaatagtgaatctttatacgaaatcaattcaaacagctggacagtagagccgattgaaggtacagacgctaatgaaaaagtggtgcttctaacgattgacgatgctcctgatgcctacggactcgaaatggcgcaaacactggaagagctcaacgtgccggcgatcttttttgtcaatggccattttattggggatgaagagggggcggatgaactaaaacaaattcacgacatgggttttgccatcggcaatcatacaatgagccatcaaaagcttgatgatgtgggagaggaagtgcagcaacaagaaattgtcgaactaaatgaccggatcgaagacgtaattggcgaacgcccccgttttttcagggctcctcatggcattaatacggagtattcccgtagcctggttgaggaagaaggcatgctaaacatgaattggacatatggttatgattgggaaagcgaatatcaaagcgaagaagccatcgccgacattatggtccatactgaacttcttaccaatggcgctaatttgttaatgcacgatcgtgaatggacggcaggcgctcttgaagaaattgttactggtttgcgggacaaaggctatgactttgtcgaccccgcccaattaaactaatgctcaagccacccgaactgggtggcttatttatttttaatgtgacatgctaaagagccttgacgaattaaatgagccatactattataaacataagcaatagaaagcgattccaacctaatgaagaggagcgatgcaagtgggtacaattgtttgccaacattgtaatgaagccgtggagcatttcgaaggggaaaaagtcagccgtttgtacgcggtatcatcttgctcacgttgccagcaacaaacgactgaaacgctcgcgaataaatagacgataatgaacaccttgcaaggatgactgcaaggtgttttttttgtttacgcataagcgcggacttctttttagataaacgttttattttcaaatagattccaattaaccaattctattgatgtgggtatttaggcgaattctaaaggatttctaaaatgtgacgatgctggattgtgtcgctatttatcaaatcgtatactaaatagcgttcaatatcaccatgaggaaagaaggaagaaccaagtgaatgaatcagctattcagtcaccacgagaaaccccctattttattatttgcctcttatttagcattctcgtctacattcttgcagtcatctccattattggcatcgctattgtattgactgtctttgcgatcttgtatgtcactcaattattagcaatcggatctattcgtgggaacggcgtccggattcacgaacatcaatttggcgatgtctatgagcgtgtggtcgcgatttcaaagaagatgggtgttgagaacgtacctgatgtgtttgtcgttgaagcagaaggtctcatgaacgcattcgcaacacgtttttggggcaagcatatgattttactcacctctgacgtatttgaccttgccaggggagctggtgaagcggaactcgattttattatcgcccatgaattgacccatattaaacgcaatcatgtatggaaaaatgtccttattgctccagctaagctcattccttttttagcacaagcgtatagccgctcatgtgagtatacatgcgaccgtgctgctgcttactttacaggaaatgtggctgctgcaaaacgggctttagcgatttttagcattggcaagcgtttagcgccagagttaaatgaggaagcgtttagacaacaaatcgaatccgattcaaacggagcggtttggcttagtgaagtgttgtcgacacacccaaggctaccaaaacggattcaatccattgctatgtttgccaacgaacaagaagtcaatgtttatagacaaaataacggtgtgattgttctcggaattggattggtcgttattggtggcgtgtttgtgtatggggcggtcctgctcgcaattgtgttcggctctctcacatacggattgtttgatgataaattcgatccatccttttctattggatacaagcaatttaattggagcagtacggatacgacaaatgttgggggcgccgtcgatagaagttctagcgacaggtcgccattgttccaagctgtcattgcagaagaccatgcaaaagtgaaacaacttttgcaaacgggcaattttgacgtgaacgaaatggaccgttatgggaactcgcttctctatcatgcaaccttttatgaaaacaaagagctagtagaattgcttcttgaggcgggtgcggatccaaatgattattttcaagatgatagccccctcgtttccgccgtttattacgatgattatgacacagcgttgcttttgcttgactacggggcagacccttattacgaagattcttacggcgatagtgccttatcgctaatggatgcagaaaatgaagaagaacttagagacaaattagttttttatgcagagtgaaccacccaccatttatcacactggcaggtcgcttgaagtaggggcttcttttggaaatgtgttaaatagaacaaaaaaagcgtgctgaaactatccgatttccagcacgctttttgtgcttctctcctctcgcttaacactagcaacacgcatgtgcgtcttttatcgaatggcgcgttgctctttaatcactttcaagttggaaagtgtagcgtcttctggaccttggacaggaaggccagctttcaagttttcttttacataagcgaggttttcttcactgatcaattcccctgggctaagaatagggatgcctggaggatagaccataataaactcggcaataatccggccaacagattcatcaaatggcactgtttcagtttgcgcataaaaggcttcacgcggcgaaagggcaagcgttggaatattggcgacatggacgggtaaagacgcacaacgattagccgttgaagaaaattccagcgccagttgtgttaatgctctcagcaacaaagcaagcttttcctctgtatcgccaatggtaatgatgcaaagaatattgtacaagtcggaaagttcaacttcaatattgtaatggtcccgtagccaaacttctgcggcaaaaccagaaatgtttaagccttttaaagaaattaacagcttcgtggggtcatgggaaaatacagcggatccatggagtttttcgctgccaaggcagtatagtccatcaatctcattaattgcatggcgcatccaaatcgacaagtcgatggtctcatcgaggagttgggctccttttgtagccagatgttttctcgccacatccagggaggcaaggagcaaataagaagtcgatgtggttgtcagcatgctcataacggccgttgtatgttcaacggatacaagcccggcacgaacatttaatatggaactttgtgtcagcgaacctcctaatttatgcacgctcgtcgctgccatgtctgctcctgcttgcattgcgcttaccggcagacgctcattaaaatggatgtgtacgccgtgtgcttcatcaacaagtacaggaatgcccgcttgatgggctaattcgacaatcgcctttaaatcgcaagtaaatccgtagtaagtagggttgatcacaaggacggcttttgcgtcaggatgagcgcgtatcgctttggcaactgactctgtcgctaccccgtgagcaatcccatgttcaaagtcgagttctggatggataaacacaggcaatgccccgcaaaaaataatcgctgacataatggatttatgaacgttgcgagggacaataattttatcgcctggcccacatacgctcataatcatagtcatgatggccccgcttgtgccttgtacagagaaaaatgtataatcagctccaaatgctttggctgccaattgctgagattgatcgatgatgccatgaggatggtgtaagtcatcgagaggggcaatgttaatcaagtcaatggacagcgcttcttcgcctataaaagtgcgaaaatcggcgtccatgcctgctcctcgtttatggcctggtatatgaaaagggattggctcttttttggcatattcggttaaacccgtaaataacggggtttgttcttggtcgtgtcccatgaaggccacctcacttaaggaaattgaagcttatacaaagcaaacaagaagagtatagcaaaatggagcgcatttgcctacggatagaaaaaaggaaaggggggtggacatgaatattccgattaggtacgactggtcacaagaagagattgtcgttgtcgctgagttttttgactgtatcgcgcttgctgtagagcaaggcgtgacagctggggaaatcaaggctcactataaccggttcaaaggggtggtacctgcaaagtctgaagaaaaacagctttttcgggaagtagatgaacaactaggtatttcctgttataaaatcgtgaagcgagcactggaagcagccgaacatgaacttataaaaggctaacgataaaagccagtcggacaagaatcgactggcttttcgtcaacgtgtaggggcaccagctgtaagcgagagctgataaagaggcaacagcgttttgactgtttggcgaatagcctccataagctgctcgccattctcgactgtttcgctcccttttgcaaaatggcgtccaacgagccattctgcttttttgacgtcgcggaaccgttcaagagattgggttaaatcaagctctgacagtgggtttgcttctttttttgtgtggtcaacggaaacaacataatcagaagggacgacctcttctataagcggtttgttttccaaaaaggttttggcgatgttgcctttttccggcagctcgtaaataaacgctagccaaataaagagatggtcatcaaacaacccgacttgaaaatgggggtgttttttgtagccccgtttattgcctgcaacagcaagccacgtatcattcggtggatttgtcgttctccttgcatgttgggcaatgtgcaaaaacatctcattccctaatagcgtcgagagctcgtctctaagttctgcgccaatcacttggaattttggctgtatatttgaacggattgcggccattctttcctctagaccatcgattaaaaatgtctcaaagtctgattttgtaaacccaggtagcggcatacgtatacactcctttcgtctataggatagcttgatgaagaaaaaagatcaaatcgcttgttttgcctttccgtttgttttgttttcaatttatgccataatagaagcaacagtagataagatataggaggcttgtatggagacgacatgggtagaacttgaaaggcaagcacgtgcgtggatcgttgaggcgggagacgcaattaagcaagcgcttcaccggccgtttcacattgatgccaaatcgggtcctaatgatttggtaaccgatgtggataaaagcacggaatcgtttttttatgacaatattgtagccacgtatccaacccatcatttccttggcgaagaagggattgccgatcgcctcgatacgctagatggcattgtctggattatcgatccgattgacggcacaatgaactttgtccaccaaaaacgaaattttgcgatctctgtaggcatttacgaaaacggaaaagggaaagtcgggcttgtttatgatgtgatgtcaggcgagctgtttcacgcaatcgaaggcgttggctttttcatcaatgacagaaaacaatcgcctgcgaaaggaaatgagttagctcagtccgtaatcggcattaatggcaattggcttgtgaaggacaacttgccgatccagcctgacttggtagacatcgctaaaacatgccggggaacacgcagttatggatctgctgcccttgaaatggcttatgtagcgagcggtttactggatgcatacataagtccaaaattgtccccatgggattatgctggcggtgcagttttgttgcaagaagcaggatgcaagacaactcgctttaatggagaggcattgtcgctgctggaaagagggtcaatcgttgccgcaaaaccgtctttgcatgaaacattagtatccacgtacttgcataagggggagagcacatgaaagtaggatttattggcctgggaacaatggggttgccgatgacgcgccatttagtggaggcaggctatgagacatatgttgttagccgcagccgtgggccgattgaaaaagcgcttgcatttggcgctgtggaagcgagctcgccaaaagcgttaatggaaaccgttgatattgtgatgacatgtttgccgctaccgtcaacgattcatgatgtgtatgacggtccgaacggacttattgccggtgcttccgcaggcaaaatcgtcattgaccattccactgtggaccgtgcgaccaacgaatgggcgagcagccgcttaaaagaaaaaggagcttcgtttctagatgcaccaattagcggtgggccaatgggagcagaagccggcaatttaacgattatgtgtggaggcgaggaagacgcatacgaaagggcgctgcctgtgttaaaggcatttggcgactacattgtccgcgttggcgagacagggagcggcacgacggtaaagttgctcaataacatgcttattggcgttcatcagtcggcgctggcagaatgttatgtcatggcagaaaaagctggtgttgatccggcagttgcctacgaagttattaagcgaagcgctggcttttccaaaagcatggactgggcagtaaatgcgattttggacaggcagtttgaagcccgtttttccattaacttgcttcataaagatatcggcttggccttaaagttggcagacgacattggcatgccactcgacgtcgttaaattaggggctgaaaaagtcgcaaaggcaaaagaaaagtacggagaccaagatgtgagcgctattattcgaccactagaagaagcaacagggacgattgtgaaacgccataaaaaagagagccattgaccggtcagtggctctcttttcattttaaaaagagttatgattcgattcatttttttttctgcggctaaagccgagtcccattgaaaggaaaatacctaaaatcgcaacaatggctataacgagactccgctctgccactgcaacgccaattgccataatgcacaataccgttataattgaaagcgttaaaaacaatagattttcttttttcaaaacgggcctccttccctcgctattgattagtgtaccgtgatccgcgaaaaagggaaagtaaagactgtgacaaaacggaaaacatttcgaatcacgatctttacgacattcttcagcaattgaagtaggaacggggctcaatttgtggtatacttgtacagttaaaagcctgaatgagagagaacctttcatccatgattgcccatgccttccagtacggatgaccaaaatgggcttaacatagaaggagagaaaaaacatgactgtacgcgaagagttgcgtaatattgcgatcattgcccacgtggaccacggaaaaacgacattagtggatgaactcttaaaacaatctggcacatttttgcaacatgaaactgtgcaagaaagagcaatggattcgaatgcgattgaaaaagaacgaggcattaccattttagcaaaaaatacagcaattaattacaaaggaacacgtatcaacatcatggatacgccaggacacgccgactttggaggcgaagttgagcggattatgaaaatggttgacggtgttcttcttgtcgtcgatgcttacgaaggctgcatgccgcaaacgcgttttgttttgaaaaaagcacttgagcaaaagctggcaccgattgtagtcgtgaataaaattgatcgtcctgcagcccggccgaatgaagtcgtggatgaagtcattgatttgtttatcgatttaggagcagatgaagaccagcttgattttccggttgtctacacttctgctataaatgggacggcatccttatcgccagaaaagcaagacgaaaacatggatgctcttttccaaacggttgtagagcaaatcccggccccagtagacaatagcgatgagccgttgcagctgcaaattacgttgcttgattacaacgattatgttggccgtattggaattggccgagtatttagaggcacgattaaagtgggccagcaagtggctctcatgaagcttgacggcacagtcaaacaatttcgcgtcacaaagctgttcggctttcttggcttaaaacgcgctgaaattagcgaagcacgagctggcgatttagtggctgtttcgggaatggaagaaatcaatgttggcgaaacggtttgtccgatagagcatcaagatgcgttgccaccgttacggatcgatgaaccgacacttaaaatgactttcctagtcaataattcaccttttgctggtcgtgaaggaaaatttgtaacaagccgtaaactagaagaacggcttaaagccgaattagaaaccgatgttagtttgcgtgtggaaaatacagactcccctgatatgtgggttgtctcagggcgtggcgagctgcacttgtccattttaattgaaaacatgcgccgtgaaggatacgaactacaagtatccaaaccggaagtcatcatccgcgaagtcgatggtatccggtgcgaaccggtagaacgtgtgcaaattgatgtgccagaggaataccaaggtgccgttatgcaatctcttggggagcgcaaaggcgaaatggtgaacatggccaacacaggaagtggacaagttcggcttgaatttctcgtacctgctcgtgggttgatcggttatacaactgagtttttaacgcaaacacgaggatacgggattttaaaccattcatttgattcctatcagccagttactgctggccaagttggcggtcgccgccaaggagtgcttgtttccattgaaacaggaaaagcgacccaatatgggattatcaatgtagaagaccgaggcaccatctttgtagaaccaggcacggaaatctacgaaggcatgattgtgggcgagcatacacgggaaaatgatttgactgtcaacattacgaaaatgaagcagcagacaaatgtccgttctgccacaaaagagcacacggtcacgatgaaacgaccacgcattttgacgctagaagaagcgcttgagtatttgaatgacgatgaatactgcgaaatgacgccacaatcgattcgcttgcgcaaaaaaatcttgaacaaatcagaacgggaacgggaagaaaaacggagaaaaatcgcttcaagtaagtgatgattattggtgaggaagggctgaaaagaacatggaatttctagctgagcaaaaaacggttccgcttgaaagcatgccgtggcttatgcaagcgacctatgagaacccatggattggttttattgcttttgtggcgacaattgtcctttgtgtgattgttttcaatctcggttttgcgaggaaactgccgttattgaaaatggtcgttatttacgttttgttagtaattggcagctttgggctctggtttttggaattcgtttttggcgcgccgattttagccgtattagccatttctgctgtcgtgctaggcatttatcgttttcggctgcacctccaccgcaaagaaaaatcgcaaaatgtataaacggaaagtgatcgtaccaatcaggcggatgaatacgcctagcgttttaaaaagagtgactggcttttatggccagtcactcttttctttttgatggggggtataaaataagccagtcgctttacgctcaatcgtccgtttttcaattcttgctttacaagagtcgcacatataggtatggataggacggttgcgcagccgtttggcaagggtgctaaaatcttcaatatcattaattttgtcgcacatgacacattttactttcaattttggctgcacctcctcgagttttatatggatcaattatccaatttcttttaaaaaaacaggcacatacggatggaggaacttgaaccgttattgttattgtaaacaatttacgaaaaaaaagaaacgcctgcatttctttctaaactttcgtctaagttgttttgctcctacatacgataatgaaaaggaggcttgccttaaaaaggaaatcgagctgcacatgtcgggaggcgtatgatttggggaaagctaatcaaatttatgtattagacacaaatgtcctgcttcaagatccatatgcgatctaccaatttcagccgcatgaagtggtcattcccgctgtcgtattggaagaagtggattctaaaaagcgaaacatggatgaaatcgggcgcaatgcgcgtttgatcgcaaaaatggtcgaccaattgcgtgatggcggcaaactccatcaaggggtcgtccttgaccggggcggggtgttccgcgtggagctaaatcatcgctctttcaagcatttaaaagatagctttgctgaaatgacaaatgacaatcgcatcattgcggttgccttaaatttgcagaaggaagagaatgaaaaagcaaacggatgtgaagtcgtccttgtcagcaaagacgcgctagttcgcgttaaggcagatgcgtttgatttaagaacagaagatttcctaaatgaccgcgtgattgaaacagataaaggctatgatggttttgaaacttgttatgtcgaccaggaagtcatcgaccaattttataaaagcggtcaagtgtcggtgacaatgttgccagaccgctcctttttcccaaaccaatttgtcgttttaaaagaccacgtccaaccttctagttcagcgcttggaaaagtcgatttgcttggccattcgattaaaccgcttgtaggcgagcatgagcaagtatggggaattcgcccacgtaatgcccagcaaaagatggcactggagcttctgttgcggacagacttgccgcttgtgacgatgattgggaaagctgggacaggcaagacgttattggcgcttgctgcggggcttttgcagacggaagacctccacctttataaaaagcttgttgtcgcccgccctgttgttccactcggcaaagacatcggctatttgccaggcgagaaagaggaaaaactaaaaccttggatgcagcctatttacgataatcttgaatttttatttgacacaaaaaagccaggcgagctggatcggattctagcgggaatgagttcgattcaagtagaggcgcttacttacattcggggcaggagcattcccgaccagttcatcattattgatgaagcgcaaaacttaacgaaacacgaagtgaagacgatattaacgcgagtgggggaacgcagtaaaattgtgttgatgggggaccctgcacaaattgaccacccgtatttggatgaatatacaaatgggctaacgtatgcagtggaaacgtttaaaaaagaagcgctgagcggacatgttcgattgatcaaaggagaacgctcagcgctagcgcaacttgccgcagatttgctttagatgaacacgatttcgtgcacgcggcgaacgggttctttgctgctgtcatcggcaagatagacatggacagggccatcctcttttaaaggctggcctttttcggaaaaagcagcaatgaacgaatcgccctgctcaatgctgaaaggaaacgttttgccatccgtcgtgcgtatttcgattgctgttgcactttcttctggagcagcgttgcggataaagggctttagtggcatgccaaaagaaccatttgtccatttttgccgttcaaaagcaatttgattcgaatcacggttcgggttcggtggctcagagccttcaagcatttccttatcccatttttttgctactgctttcgtgtagcttactaaatcattgtcatcaggcaagccttcttcactttgaaaaaacgcttccaaatcaatttttcgctcatcaaatatccatacagtcgggtcaatcgttagtggtctagcgacttttcctgaaataaaaaacacaaactcttccattgaagcaccctccatttttacaccgtaccaaaagtatagcggggaatagcgcaattgtcacggcttctgcctgttcgaaactggggaaaaagattgcaatttcggggaaacaaagatactatgtaagtagaacgaacatttagccaaggaggggacaccttgacgacgaatgctgtgactagccagagcgagaaagcgtacgcgctcttgcaggcagatgctgaaaaaattcagaaactcattgaagtgcagctggaaaatttgacgatgccgcaatgccccctctacgaagaggttttagatacgcggatgtttggcttgtcaagggaaattgactttgccatccgtcttgaattagtagaggaagaaaaagggaaaatgattttaagcgaattggaacgcaaacttgcgctgctgcatgaagcttctatgagaaaataaaaaccgggcaacttgcccggtttttctgcaatccaagcatcgacgatggacgagttaagagcgaaataaaaattttagattgacagaaaggcaagtaatatagcggatctagctttttttttagcctgaaacgaaaaaatttttaactttatagttgccaaatcgacaaaaatcgttcaaagtataaaaaaagaaaaaagcttgtttgaaacgagttggggaggtagtcgttatgaacgcattaaaatcgattaaaaaagtgctcgttgcaaatcgtggggaaatcgctattcggatttttcgagcatgttcagagttgaacatccgcactgtcgctatttattcaaaagaggacacaggtgcttttcaccgctataaagcggatgaagcgtatctcgttggcgaaggaaaaaagccgattgatgcttatctggacattgaagacatcattgcgacagcaaaagcacatgatgttgatgcgattcacccaggctatgggtttttgtcagagaatatcgaattcgccagacgttgtcaggaagaagggctgatttttgtcgggcctgagcttgagcaccttcggatgtttggtgacaaaatacaggcacgggaacaagcattaaaagcagggttgcctgtcattccaggaagcgatggcccagttgctagcttagaggaagtccaagcatttgcggacgaacacggctatccgttcatcatcaaagcttccttaggcggaggcggtcgcggtatgcgtattgtccgcgaagaaaaggatgtaaaagaatcgtatgaacgggcgaagtctgaagcgaaatcagcgttcggcaacgatgaagtgtatgtagaaaaatttgtcgaacgccctaaacatatcgaagtgcaaattttagctgataagcacggaaatattgtccacttgtatgaacgggactgttcggtgcaacggcgccatcaaaaagtagtcgaaattgcgccaagcgtatccctgtccgatgaagtgcggaacaatatttgcgatgcagccgtcaacttgatgaaaaatgtcggctacgtaaacgccggtacggttgagtttctcgtcaccgatgacggaacattctattttattgaagtcaatcctcgtgtccaagtggaacacacgattacggaaatgattactggcatcgacatcgtgcagtcgcagttgaaaattgccgacggttacaaactccatgaaaaagaactcgacattcctaaacaagaagatattgcttgttttggctacgcgatccagtcacgggtaacgacggaagaccctgcaaatgggtttatgccggatacgggaagaatcaatgcctatcgttcaagtggcggctttggtgttcgccttgatgctggaaacgggttccaaggcgctgtcattagcccccactacgattcgttgctcgtaaaagtatcaacgtgggcgttaacgtttgaggctgcagccttgaagatggtacgtaatctacgggaatttcggattcgcggcattaagacaaatattgcatttttggaaaatgtcgtcacgcacccgcagtttttaaatggcgaatacaatactcattttatagacgaaacacctgagctatttgtctttcctaaacgaaaagaccgggggacaaaaatgttgtcctttatcggagagacggttgtgaatggctacccaggtttggaaaaaggggaaaagccgctgtttgacaaaccgattgtccctgcatttaataaaaacgagccgataccaacgggcacaaagcaaattttagatgagcgtgggccagaaggattagcgaaatgggtcaagcaagaacaaaaagtgttgttgaccgatacgacattccgcgatgcccaccagtcactgctagcgacacgtgtgcgcacgtatgatttaaagaaaattgctgaacctacagcgcgcttgcttcctgatttgttttctcttgagatgtggggcggagcgacttttgatgtcgcgatgcgttttctgcatgaaaatccgtgggaacggcttcttacattgcgtgaaaaagtgcctaatgtgctgttccaaatgcttttacgcgcttccaatggcgtcggttatacaagctatcctgacaacgtcattgctgattttgtccagaagtcggctgaagcaggcatcgacgttttccggatctttgacagcttgaactgggtggaagcaatgaagccagccattgaagctgtgggggcgagcggaaaagtggcagaagcggctgtatgctacacgggcgatattttggacaaaaatcgcgataaatatgatttaaattactacaaaaaaatggccaaagaattagaagcgtcaggcgcccatattcttgccattaaagatatggctggattgttaaaaccggaggcggcctaccaacttgtctctgagttaaaagaagcagtcgacattccgattcatttgcatatgcacgacacgagcggcaacggtattttcacgtatgcccgtgccgtcgatgcaggcgttgatattgtcgatgtcgccgtcagctcaatggcaggcctgacttcgcaaccaagcgcaaacagcttgtattatgcattagcggaaaaaagccgccaaccaaaaatggatgttggcaattatgaaaagctcgatcaattttggcatgacacacgcaaattttaccgtgggtttgaaagcggcatgaatgctccgcatacagaagtgtacgagcatgaaatgccagggggtcaatatagcaaccttcagcaacaagcaaaagcagttggactgtacaaccgttggaatgaagtgaaacgaatgtaccgtcgcgttaacgacttgtttggcgatattgtaaaagtaacgccatcctccaaagtagttggcgatatggccctttatatggtacaaaatgatttaacggaagaagcgatttttgagcgtggcgaaagccttgattttcctgattccgtagtagagtttttccaagggcacttaggccagccgtacaaaggctttcctgaaaagctgcagcgcattattttaaaaggcaagcagccgattgaggggcgccctggcgaacatatgaagccagtggactttaaagcagttggcaaaagcttatttgaagagcttggccgtcaagtcacgagccatgacgtgctttcctatgccttatatccaaaagtgtttatggagtatgagcaattttgccaacggtttggcgatgtgtccgtcctggatacgccgacattcttttacggcctccatttaggcgaggaaattgaagttgaaatcgaacgtgggaaaacgttaattgtcaagcttgtatctgtgtcagacccacaaccagatgggacacggatcgtctattttgaactaaatgggcaacctcgtgaagttcatattcaagatttggatgtgaagacaacaaccgtgacacgtccgaaagcagagaaaaacaacccgagccatattggcgcttcaatgccaggaacggtcattaaggcccttgtagctgaaggcgacaaagtggaaaaaggcgaccatttgatgattactgaagcgatgaaaatggagacaactgtccaagcagcaattagcggtacggttaaaaaagtgtatgcacgagatggagagtcgatttcaacaggcgacttgctcattgaactttccgagtagcttgtatgaaacgtagacgattatcaaacagacagcgcttggccgtcaaggcgcgaaaccgagtgaagagctgcgaatgagcaaatgaacgagagagcaatgtagaatgggaaaccgagcgtttgtctacaatctgaaaaccggctgggcactagcccagccggtttttgcgttttttatttagctttgtgccgcgtgacaagcatgaccatgtaacagagcagtgtaaataagagcgaaatgagcaacgcatggaaaataccgagtgttagcgttgcattgtatgtcaggacaacggcaacacctgaagcggcttgaccaataacgagcagcattgctaggcttgcgcaaacgacgagcacgcgggaagcgcgaaacgtttttaccgtccaaataaataaaacgagcaagagcagtgaaagcaagatcgcagcgcttcggtgtaagagctggacgccgatcgcttcagtaaacacatcaggaacccattgcccattgcaaagggggaagcctgagcaagcaagcgttgcgttcgtatgttttacataagcgcctgtgtagatcgctacataggaataaatcgctacaaaaataacatagcctttgtatgcctttgaaacaattggtgcatactgcttttggggattgctatcttcaaaagcgagcctcgttaatagcacaaccgatgcaaatgacaaagcggagaagccgaagtgaagcgccatgattaaatcagactggccaaacacaaccgcgcctgctcctagcaaaccttgaaaaatgatcataaagacggaaataaccgcgagaaagcgagtctctggcatatgctttaggcgacgccaagaccaaatcgccattaagatcacaagcatgccgacgatgccggcgacaaggcggtgtgagaactcaatgaccgtctcaggaggcgggtcgagagggatgacttggccaaaacataagggccatgtttgcccacaaccttcaccagaacctgtattcgtgacgagggcgccttggatgagcaccaacagcacgccgagcgaggtgataacgcctaatctttttaatcctttatgcaatcgtttcacctttccttctataatcttatcgaaaaatatggtaaagttagagtgggtcttgaaaatgcttcttccatcttaaaaaaggtactaagtaaagtcaatttttcagctgcgaacattctttgacggtttcaattgtgacatttacgtgaacaaaaggaatatgatgaaaccgtccccattttgcgttataatcaaaaagacagtttttacaaggctgcctgacaacaggcaccaatcgttagcacagtttgcaatcctaagtgttttctgtttaatcggagtgctgaaaaatgaatacggttgcgtaaagtgcttgtaaaaacgagttttcgttcgctgttggcaaaaaaagagatcagacaatgtgaaaaagaaagtgaggggctttgatgagaaaacagatatggcggcttgtaccggtagcattaatgctgtttttgctttcaggctgtctaggggaagaaaacctgactgcgcttgaccctaaagggcctgcagcacaatggatttatgacaacatgctattgtcgatagcggttatgacgttcgtctccattgttgtatttgtgatttttttcctcgtcatttttaaattccgtcgcaaagatggcgatgaagaactgccgaagcaagtgcacgggaatacggcgatggaaattacatggaccgtcattccgattattttgctaattattttattcatccctaccgttacaggaacgtttgatttccatgtgaacgcggatccaagcgaacatgaggacgcagtgtacataaaagtaactggtcatcaatactggtggcaatttgattatgaagaaggctttacagctggacaagaggtgtatatccctgcaggggaagatgtcgtatttgaactgaatgccgaagatgtaatccactctttctgggtgccggctcttggcgggaaaatcgacaatattccaggggtaaccaatgcgttaacgcttaatgccgacgaaccaggcgtctataaaggcaaatgtgctgaactttgtggaccgtcccatgcgctcatggattttaaagtaattgctttggaacgcgatgagtatgacgcgtgggtggaagacatgcttgccgttgaacaagaagctacggcggccaatgccgaagcaggctatgaagctttccaagaaaatgcctgcatttcttgtcatgccattggcggacaaggcatggcgacaggaccagcgctgaccaactttggtgatcgccaaacgcttgctggcgtctatgacatcgacgacgacgagctgttgaaagaatggattcgagacccgcaatctttgaagcaaggcaacaacatgccagctcatcccgacattagcgatgaagatctcgatgcgattgtcgagtatttgcgttcgttacaagtgcggggagccgatcaagagtattaatatagaaagaacgggtaaaggagggtcttagattggctagttataaaaaagaaaaaagcgttatttgggattggctgacgacagtcgaccataagaaactcggcattatgtatttaattgccggaacgcttttctttgttaaagcagggttgatggctgtgtttatgcggatacagctcatgtttcctgaaaacacgtttttaagcggccagacgtttaatgaatttattacaatgcatggcaccatcatgctgtttttggcagcgacgcctttgttgtttggttttatgaactacttcattcctttgcaaattggcgcccgcgacgtcgcgtttccgtttgtaaacgcgctcggattttggatttttatgtcgggcggactgcttttatcacttagttggttctttggcggcggccctgatgcaggctggacagcttacgtgccgttgtcactaaatgaaaaccagcttggccttgacttttacgtacttggtttacaagtctcggggattgggacattaatatctgcgattaacttcctcgtgacgatcattaacatgcgtgcaccaggtatgacaatgatgcgcttgccgttgttcgtttggacatcattcgtcacgtccacgttgattttgtttgcctttacgcctctagcggccggacttgctttgcttatgcttgaacgcatattcgatgcccagtttttcaacccgacagcaggcggaaatgtcgtcatatggcaacatattttctggatcttcgggcacccagaagtgtacattctcgttttgccggcgttcggaatcatttctgaagtcattccggccttttcacgcaaacggcttttcggttacacagcgatggtattcgcgacgatgatcatagctttccttggtttcatggtgtgggctcaccatatgtttacagtcggtatcggtccagtggctaactcaatctttgcgattgctacaatgaccattgctgttccgacaggtattaaaatctttaactggctctttacgatgtggggcggcaaaatcacatttaatacgtcgatgctatttgcttcttccttcgtgccgacgttcgtgcttggcggcgttacaggggtcatgctcgcaatggcgccggtagactatttgtaccatgatacgtactttgtcgttgcacactttcattacatcattgtcggcgggattgtgtttgcgctatttgccggattgttttattggtatccgaaaatgtttaaccataagctgaatgagaagatgggaaaatggttttttgttttgtttacaatcggattccatttgactttctttatccagcatttccttggactgatgggaatgccgcgccgcgtttatacataccttggcggccaaggcttggatgatttcaacttaattagtacagtaggcacgttctttatgtcggctgctgtcattttgcttgtcattaatattatttattcagcgtttaaaggggagcgtgtcattggcataaacgatccgtgggatgcacggacgcttgaatgggcaacgccaacgcctgtgcctgaatacaactttgcgcaaacgccgcaaattcgttctctcgatccgcttttctatgaaaaagtgcatggtgacggaacaatgaaaccggcagaacctgttggcgacattcacatgccaaacggttcaattttgccgcttattatttcaattggccttttctttggcggttttggcctgattatgttggaaatggataacccaattgtcagcccatggatcgttgttgccgtaggtgcgatcctcacgttcggatcaatggcgctccggtcgatcaaagacgaccatggctaccatattccaaaaagcgtcgttcaggccgatttgaaaaaatggggaggtggcaaataatatggctggatctgtagatgctacaaaaggactgccctcccatccagagcgggcaacactggaaggcaaaaacaagtttttaggcttctggtttttccttggcggagagaccatcatgtttgcaacctttttcggcacctatttagggcttcgcaatggtgtcggcaacggtcccgcttcgaccgatttgttcacactgccgctcgtgttcctcatgacgatgctgttattgacaagttcaatgacaagtgtgtttgccatgtttgcgatgaagaaaaacaaattcaagcaaatgatgacgtggatgattattacagtcgtgctaggattggcgtttttagggttggaaatttacgagttccaacactatgtccatgactatgaattcggctttacgactagcgcgttttcatcggcattctatacgctagttggtttgcacggcgcccacgtgttgttcggactcgggtggatcacgcttttgattatccgcaacttccgtgctggcatcacattgaccaatgcaccgaagttttacgtggctagcttgtattggcacttcattgacgtcgtttgggtatttatttttacggttgtttatttaatgggagtaggagggtattaagatggcggatgaccatttgagtaagccgtttgataagagcgcaatgacggaagcagaaaaacgggaaatgaaaacggaaatccgcaatcaaatcgtcgtgtttgtcctcatgttgtttttaaccgtgctggcattcgcggcggttggtgccgatattattccaacgaatttcgctgtaccgtttatccttattcttgctgttgttcagctactgcttcaactgttgttctttatgcatatgaaggataaagaccatacttgggcaacggtgtttatcattacgggcatctttgtcacagtaccaacgattgtgtcgcttatgctgctaatcggtattgtgaaatattagtaggaaaagccttggctccttagtcaaggctttttctatatttcatcaaattgcaacatcaacaagcgctgaaatgcccgtatgtattgtagtatacttagtaggcagtaattggaggagtgatggacatggaaaatggctcaaatcaatacaaacaaaaacggaattatcgaccagcgattattaccatctcggccatcttgattggcgcaatcatgattctatcgggaatgccaggtgtagaagactttgatttgtttgacgtcaccattttgccgatgttgaatgcgatatttaattcttttacctttctattcttgctttgtgcattgattgccattctgaagcggaaggtaaacgtacaccgacgttttatttatgctgcctttttgacgacaacgttattcttggtgacgtatgtggcccatcacgtcttagctgagtcgacagcttatggcggcagcggctttatggccgtgttttattatttcattttgattacacatattgtgcttgccgcagccattgtcccgttggcactaacaagtgttgcaagagcttggaacatggaaaatgagcgccataagcggattgcccgctggacgatgccgctatggttgtatgtcagttttacgggtgtgctcgtttacatcttgatttcaccttattattaatggtttccttaacggcttcctttcaggtatactagaggtgcggcatcagcgaacagaagggacgagaaggaatggcagtgacatctatgtggaaaaggcaagttgccgtcgcactattggcagcggctttactcggcgggtgcagtgatccgaagccgggagcactccatgccgttccagacgagactgctgagcgtgtttcagcgtttgtaacaagctacaaacaagatatggtagcggcggttaatgatcacgaattggctcaattggaagcggactatttgcttccgaatacatcctttttccatgcgttacaacgctacggagaagagctccaaaaaaatggctcaacgaaagagcttgtttcatttgaagtagaaaacgtatatgaagacgacaaggaaggcgactattttgcagatgtcattgagcaagtccatattatgacagacgaccaagtcgatgacattactagaaacgtccgttattgggttgtggagggagctgaccagtcattgcggctgtatacgattatcgacaggacgaatgaaagcgattgatttatcggtctctaaagttattttggcaaaaaaataaggcgagatcctactcctgtagcatctcgtccttttttgtaaagatgaagcggctcgctccttaccactcagctttaatcgtctttgcgagaagagccaacttgttattgcatttgtcaataactgcttgtgggaaagtttccccttcgtattcgacgccgtgagggtagtaatacttaccaagaatcggcgtcataatttgcacaatcgtggaaggtcgtggaatttctcctttcacagcataggcagggacacgcaaataaaacgtgccttcatggtggacgattttgtagtcgaacataacccgttcgtagtcccactggtcgacatggataaagccgagcgatttggctgcgtgattcacgattgaaaatgctacttctttttcttcaagtcctgtatccggaaatttcacaggttttcccccttcattcgacagctgtttctcattcctaatgatagtatgaaacgctttcttatgcaacgggaaacgcaattttcctagactggatgtaagacagaaaaagacaccattcctcaagactagagaaaggaaaatcggcagttggtgccaattttatagctaaaggtacggaaggatgtgagaagatgcttaaacgctctgcacttctaatggttctactcgcgatattggcagtgcttgtttatgaacaacaaaaccagatggcgcctgcgccggatgcttcaatcggtcaaatggcagctgaaaaaagaaaatctggcaatggcggcaaagacagtgcccaaacaagccgctttgccactgaagaaaagaaagatgacgttgatgagggaacggatgaggatacaggcgaatcagacgccaaaacggagcaagcttccgcttcgctcgttaatgtctctgctttaatgggaaagcaggagaaagatgtgattgccacatacggtgatccagtgcgaaaagacccttctgcctttggttatgtgtcatgggtctatacaaatgtggatgatgggtatttagtcgtctgcgttgaacatggcgaagtggtgtctatagttgctagtggctccgctgccgcgggatttttaggaaatgagcgcgccagtttttctgaattagagaaagcctactcttttgaagaaaacgtacccgtcgaaacagatgatggccagttcacgttccgtttaacaggggaagattacaagatgcgaccgctcgcaccagttgatgattactggctgcaagtttatatggatatccataccgacgaagtgtcaagcatccgtttaatgacggacgaggtgctcctcaaacaaaaaccgtactcattaagctatacaggtacgcttccagagaggccagaattgtcggaagaacaaatgaagcaagtggaagctgccaatgaacaacaaatctttgaacggactaaccacatacgcgcttaccatggcttgcctccatttgagtggtccgaagaggtagcggatgtcgcttatttgcacagcaaagacatgcacgatgaacaatattttgaccatgtctcgccagttaaaggaaacttggccgaccgttttaacacgggcgaggtgccatttgcgatggcaggagagaacattgctttgaaatacgtcgatggcattgcagcaacagaaggttggttaaacagtgaagggcaccgcgtcaatttgcttcacgaggagtttacgtttttaggcgttggcgtgtacgaagattactatacgcaaaattttctgaagccccaatcgtagcgatagcaacaagccagtaggtgcacaaacgcgcctactggctttttatgccgactagcggcgaggaatgacaaaaaacgtagcagtcgctttggcaagcaaacgttcttggtcatcaaacgcttccccttctaaaacaatgagctgtttgcctttatggacaattttggctatgcatcgcatgaaagagccttttccagggcgaaggtaatggatattgagctgggaagtaaccgccgttaaatggggcgggaggctgttcatagcagcgccgcctagagtagaatcaaggagggtagcagtcatgccgccgtggacgatttgaaggggattatggacaagggggcctagcggcatccgcatttcaaatgtttcattgtcgtgttggcttatttctgctttcgtaatcccggataaataggtaagttgttcattttgttgtttggcgagcagcccgtctgtgatttgctcaaggacagccagctcttcttctgttgcatgttcgatatagtggttcaatttttctttaacatccatgtcattcaccttttttcacatatctagttggtctacatactctagtagtgtaccaaacattaaagtgcttgcgcaaaaaaagatgaacgttggactcggtgggcggatatactactatacataatccatttaagagaggatggtacagatggaagacaaggcgaatctgcatccttcagttgaggaatttaaagcgtttgtacgggaacatccgaggctcataaaagaaataaaagaagggaacaaaacactccagcatacctatgaggaatggacggtccttggcagttcacatgaacactgggctccttataaaaataaagatacgactgcttcgtccgctgccaatgaaaaagaagaaactgccgacgagtcttctagcacgggtacagaatttatcaatcaattgatgggcatggttaaaaaaatgaatatccaagatttgcaatcacacttaaaccactttagtacaatgcttaccaatgtccaaggcttgatacaaacgttccaaaagccgtcagaaccagtgcggcaaagggaaagcgaatcgcctttttcttttagaagagattaaggggggcagcaaatgagagaagaagtacagcgaaaaatttttgaacagccagaattaaaggcatttatccgctatcatcctgaatggtaccgccgacttgggcgacagcctgaccagcttgcggcaatggaaagagaagcaaattatttttatggaaaaacatggccgcaacgggttgaaaaaatgcaaaacaatgtcagcatggtcatgatgttgatggaaatgttgaaaatggggcaaaacacagtagcggagacagtccaatccgtaacgaacaattaaatgtccgttgcggattttttgatggcctcgtaaatgaatgattctgggtgcaaaccttgctcatggaagccttggttgccgaagagcacattgaattcaaggatatagaaacgatttttagcaacgaggacatcaaagccagcgtggttgatgtttaatgctctggccacttgttcaacgagagcgaccgcttcttttgggatggctttaaaggaaatcgcgcctccttgagcgatattgttgcgaaaccctgactcatttatgcgccaatagctgttgacaacgcgatctccaatcacacataagcgcaaatcacggtcgctttcaatgtattcttgaatgtaaaggacttcatggctgtcagcgtaagcgtggagttgttgttcattttcaataaagaacacgccttgtcccatcgatgaacgcaccgttttggcgataaaaggaaaagaaaaagattcaatgattttttgaaccatggcgttactcgagccaacaatcatcgtgttcgggacattgtctggacaaacagcccataacgcacgtgtcatttcgattttgctatagccaagctgaatgctttcaatgcttgggaaaatcggttttttaaagccatagacgaggctcgtcacttgccaattttcagggaaaaggcatagatcggcgttagtaatcttttggcgttcctgaaacatcgcttcaggctttatgtaatcaatgcctggtatgccgattgtccggaatgggttaaatgtaacaaggttcaaagtatttcctcctcaaggaaaaataggtgttggcaacaaaggagagaagcaattaacggaatgaattatagagaggttttaggtggcttgtcaacgtataaatgattagcctaaaaagaaataatcgtgctacaatggaagaggaggtgtgccatgattgctacaattgatgcgatggacatgcttcaagcgtcagatgagctggcagcaatggtgctgcaatcaagcgtgtttgctaactatcgcttatcccgtgcccgttttgaagaaaaccgtgctgcgcaagcaaaggtagaacgctttaaaaaagtgaagcaagcccatgaggaagtgcagcggtttggcaaatatcatcccgattataagtcggtatccgcggaaattcggatcgcaaagcgcgagttggataaagatgaggtcatttccgcttttaagcaagcagaaacagaactggagtcgctcttgaatgaactcagcaccatcatcgcccatagcgtttcttcttctataaaagtacctacaggtaacccgttttttgactcaatgccttgtagcggcggctgtggctcaggagggagctgcagctgcggctaggcagttttaggccttgaaacgtggataaaatcaatgtaggatgagaaaaatgatagcaacgcaaattgatttgatcaaaaggggaatggaagatgattagcccaaatcggcaagggattgttgtctggcttacgtcgcttaaatatgcacgccagctaagacggtttggacatgtccagtacgtctcaaagaaaatgaaatacgtcgttttttattgcgaccagtcaaaagtgcctgaattggttgacaagctttccagctttcattttgttacggacgttaaaccatccatgcgcccgtttatcaatacggagtatgaaggggcgaaaccagataaagcgaaagaatacgattacaaattaggcatatagcctggaaggtggttgatccttccaggtttttttatgtcgattccttaacttaacggtggtaatattcgctggaagcggagtaagccaacaaggtattggtcgtataattcgatatcgtaaaaggccctttttggcttcacttccagtttgaaaacggtaaagccaagttcggaagcgagtgcatagaaggcagctagtcgtttattttggcgattgtttgcctgaaacccttccctacatatgtaaatcggcataaattggctgtctccggctggcttaaagcatacggccaaggaggaacgcccttcttctgtttgcaattctaaaaaagcatgggcgcgcttggcattgctttttgccagttctagcagttcaaagaaatcagtatagccatttcctagttcgataaatcgttgaatcatcgtgcatttcctccaactacgtttgagtgcagaatagcatgggagcgagcctttgtcgagcaaaaaataggcgcccttcatgaagaagagcgccttgccatgattttcacatggctatgggagaggagaaaccggaggaagagcttatggggaaacgtaagccttctccgcggttgtcgcaacacgtactgtgctgctaacatccagtatggtcatggaatcggcgctttatacacatcttttaacagctttttgaaacaagtcgttttgctctagtggggaggggacgaatgatccggctattcgagcctggaagtcttattgctctcgtttgtagcaatttgctatcatcaatgttaactagagataatgttgctgtatgaataaaagaagaagatggaaatcatttagtactgagctagctcttcatctgtagattgttcgtttggccctaaagcgattgtctgcgtgtccaatcgatcaatacagcttggactgtatgcgtgttgcaagtaggagcggttcatatatggtacgatagaagaaaaacagatgattaggtgatggaaatgagggttattgcgggtgaagcacggggcttacagttaaaagctgttcctggaaaaacaacacggccgacgacagataaagtaaaagaagcgatgttcaatatcattggcccttattttgatggagggaaggcgttagacctttatgcaggtagcggcgctttagggatcgaggcgctgagcagggggatggaatcatgcatttttgttgaccagaacaagcaagcaattgcaacaatccacgctaatttaagccataccggctatacagataaagcagaagtataccgcaacgatagcttgcgcgctttaaaagcagtcggtaaacgagatgtcgcctttgagctgattttgttagatcctccgtatgccaagcaacaaattgcgacgatttttggcttgattgacgactaccatttgcttgcaccagcaggcgtaacagtttgtgaaacagcgctacatatacagttgccagacacagcagggcctttaattaaagagcgggaagaatgctatggcgatacaaaactaacggtttacaagaagggttgatgagatgaaaagagcaatttgttcagggagctttgatcctgtcacgaatggccatattgacttatttgagcgggctggcgccctgtttgacgagatcattattgcgattttaatcaacaacaaaaaaaagccgctttttccattggcagaacgggagcggctgttacgggaatcgattgcccatataaaaaacgcaaccattgattcatttgatggcctgcttgtcgattatgcgagagaaaaggaggcaacggcgattgtacgaggccttcgctcaaatgctgattttgaatatgaaaaaaatattgccaccatgaacaaagaactggcgccacagttagacaccctttttttaatgacagatccgaattattcttatgtcagttccagcattgttaaagaggtggcgagctactcccaagatgtgtcaaagctcgtgccacagcctgttgctcatgctcttaaggaagtataccggcgctagtcggtttcccgtaacaaaacgcgggcgttggcgaaaataaaatacaacaacgcacatagggtgatcatgccgccgtaagcagcgagccattcccaaatacgttcgccaaacaaagcaggggcgttggcgccaaagcttcctgtttcgtgggcattcggtttatagagtggttggaaaagaagtgcagctagcaaagcagcaaacacaccgtgcaaaaaacgggcgaaaaaaaatgggcggaagcgaaggtctgactcagtcaagatgctggccacttgggcctgcactgaaaagccgccgaacccaaggatgaaagaaacaacaatgagctgaaaccatatagatacgccgtctgtgctgcttatttgttcagcgccaattgtgatttcaaacagaccagctaaaaaaggcttagctagttcaggcggaagcccaacaagggaaaagagctgttggactgcgaatgctacaaggctaagaacgcctagtagtgacagcatctggtttaatacggaaaacaagataataaaaccgccaatcaacagcagcgtttggatcgatgagcgaaccgcatcgccgagcaacttaccgagcgtgcgcccgtcttttaagcgttcttcatgcaaaagcaagaaagcgtctgttagctgtagcccctttttgctgcggcttctctcgtccgtttcagaaactccataaaaacgcatggaaagcccgactaacacgttgccgccatagtgggcaattgctaaaaccattcctaatgcagcgtcgtggaaaaaaccgactgcaatcgccccaaagataaacaaaggattggacgaattggtaaaagcggcaaggcgttcgccttctattcgcgtgacttttttctgttggcgcatgcggacagctagtttagctcctgcagggttgccgctggctagccccattgcccaaacaaagccgccaatgccaggtacagagaagagcgggcgcataagcggttccaatagtacgcctataaacgaaacgactccaaagccgatcagcaattcggaaacgataaagaaaggcaaaagcgacggaaagacgacatgccaccacatctcaagaccgcgagtagacgcgtccagtgcctctttagggaacagcatgagcgcacatgcaagcacaattgcggcgcccgcaaggaaaccagttttaacgagcgatgcaaagtgggcttctttcatgaatgggcgtcctcctttttcatagccgatgcctgtcctcttaaatatacgcataacggtttggtttagaccataagattgaaacacgttaagcgaacgagtacaataaggaggaaatgcctatgggcgccaaaaagccaacgattggactggcccttgggtctggcggggctagaggctttgcccacattggtgtgttaaagacgcttacagaagcgggggttcacattgattatttagctggtagcagtatgggtgcattggtggcgactatgtatggcgtaggccattcggttgaaacgatggaaatctttgcgaaacatttcaaacgaaaatattacttggattttacggtctcaaaacaagggttgatagctggacaaaagattgaaagccttattcgtctactagctaaaagaaaaaagctggagtcgctttttccgccagttcaagtggtagcaactgatcttttaagcggccaaaaagtggtgatgacaaagggagacgtcgccaaggccgttcgagcaagcttgtcgattccaggcatttttgtccctgtccaacgggacgggcagcttttagtagatggcggggtggtagaacgggtgcctgtatctgttgtccggcaaatgggggcggatattgtcattgctgttgatgtttccttttttcgcacaacccttacatcgccctcaatctacgaaattcttatgcaaacaatggatgtaatgggaagggagttagcccggaaacaggaacatgctggtgacattttgctgcggccgattttgaaacactcgtctccgttagatttttcagagacagaccagctcattaaacaaggggcagatgcatgcagacaacaactcccggggattttgaagttgattgaccaatggaggtaggagatggaagggacgcgacgtacgtttgcttggaagcgttgggtgctattatttattattatcgttgttcttggacggctggagcttccttattattatagtcaacctgggattgcccaaacgttggaggggatgattgaggtagaggaaggctataaagacgacacgggtgcctttatgctgacaacgatcagaagtgcaagggcgacaccgttgctagcaatttggtcgctgtttagccaattccgctcactttctccggctcctaagaacatttcagatgaagaatatgatgagcggcaaattatgctgatgaacaattcgcaagagagcgcgaaaatagcggcatatcgagctgctggcaaaggcgaagtggaaattgactacaacggcgttttcgtcacaggcgtggttcctggtatgtcggctgacggggtgctggaagcaggcgatttgattactgctgtaaatggcgaaacgatcgaaacagtcgaagagctatttgaccacatatccaattacaaggaaggggaaacggtagaactaacgtatgagcggggtacggctatccgcacagatacgtttaccttttcgacttttcctgtagaccaaagcgttgaagacgggcaagtaggcattggcattgtcgggccagtaacgaaacggtcagcaaggtttgatccggatgtcgagatttcagcgggatccattggcgggccatccgcgggattgatgtttgcccttgaaatttatagtcagcttcttgaaattgatttaacaaaagggtaccaaattgcaggaacaggaacgattgacgatgatgggaatgttgggccaattggcggagccaagcaaaaagtggttgccgctgatcgggaaggcgctgattatttccttgcccctaatgaaaatggggcgcacaattccaattataaagaggcgaaagcagccgccgaagcgattggcagcaagatggaaatcattccaatcgatacattggaagaagcattaagcttccttaaagggcttcccccaaaagaaagcgcagcatcttagctgcgcttttcccaattaatcggtttttgctggaattctcgggtgacctcctgctttagcgcctgtggaggcaatggcagccaataacattggctaatgcggagctcttgctcccctgcttgcccgtagcggcgcagttccccttgtcttgtaacgatgggcaaggaaaaggtttttttgttttctcttatgtatgttttgcctgtttcgctcataccgagaaggcgaatgtaagcggggccgctttgctggatagccgcattttcttctgcggttgtgcccgttaacaaatgggcaaacaaacgttggagcctcgtttgtgtataacgtttcgatttcgtagctgatagccagccttgaaaggaagaagcgctaaatagtgaatctcttaagcggtgctcaagcccttcgctgcattcagccgtttttgctaattcagcaagtggcgtcgtcagcactttgtgctggagaaaggggaaataatgttcccatgtatgcagcaaccggtaacggcgcttatacatttgaatgaggcgggctgtatgagcaggtacggctgtctcaatgttttcgccagacaataacgctttgcggattgccgttgcgcttgcaatgggcccggcaaactccttgtcatggtaaccggcttgaatacgcaacgttgtcgttgcttccatgctgattccaaggcgttggatcgctttcacgtaatggtaaccaagaatattgttcggctgatctaacggcagcaatttttcgtgtccagacagcattgaaaaggcctgtgcgcttgcttttgggtatgaaaccccatcttttaaaaactgtttcacatggtggttaaacgctacttggtggtcgttcataaactcggcaagtgcataaaaaggagcgatttcccctttctcactgccgaagtttagtacagaacaacggagtgccgctaagatcgtcactgcgccttcggcgaagcgctctgccgtctgtacggaataagcataagggagttcaacaacgaggtctgctccagcagccaatgccatttctgcccggtaccagcgtgataaaagcgctggttcgccccgttgcaaaaatgtgccactcatgacagcgacgaccacgtctgcgcccgtttgctgctttgcttgtgtcaagtggtgcagatggccattatgaaatggattgtattctacaactaagccaagtgccctcacgccaataagccctcctcttgattttgcgcatggtcatcccacatgctaaaatgggacgtacttgggtaaattataacctatggtagcgttaagggaaacgccagtagctgtaaagaaaaaagattgacattatgaagccttggttttataatgattcttgttgccttatgaggtgaattaagtatggaatggaatgttcagcagttgcaacaggctcgctttgagcccattcatttcgagcaaacgatcgaagtggaagacggtcttactgaacatcaagatgtacgagcggcgagccccattcaaatcaatgggacagtgtcggcaaagcgcaatgtatactcgttttcatttactttaaaaggtgagctgacgcttccttgttcacgcacattagccgacgtcgtttggccatatgagctaaaggaagaagcgcattttgtgcccgaaggtgaagtgcctccgccggagcttgaagtagaggatacgtacacgtatacaggtgaaaagattgatttgctgccagttatgaaagagcggatctttgtgaacataccgattcaagtctttgcggacaatccttcagatgtgcaggcacccccgtcaggaaatggttgggagcttgtgacggacaaggagaaaaaagagcggattgacccgcggctcgctgatctagcaaaattttttgataaagagtagtactgtatcgtccgaatgcttgaaggaggtgttaataatggcagtaccgtttagaagaacttctaaaacaaggaaaaataaacgccgtacacactttaaattagaagtgccaggtatggtggaatgcccagagtgcggagagtacaaactttctcaccgcgtctgcaaagcgtgtggaacatacaaaggtgaaaaagtagcatctaagtaagcagagagcctccaggctttctgcttttttttgaataatattctgcaaaatagggtaatctggtttaatagaaaacgtctatttaaccagaggaaagcatagattttagtaaaagaaccgattttttcgtctatcgccatgctatacaacaagccgtttagctaggtcgttgccgttttgattcgatcgcctagagtcggagacaagcagctttgctaaaaaccgtactgatccatcccaaatagaggaaaatgcgtggcgagcgtccatcggctttcactggggtagtttaagcccattagtataggaagaaaagaggaggacaaacaatgacagctaaccgccaagacgcgtgggcgcaggaagatgatttgctccttgccgaaacggtgcttcgccatattcgggaaggcagtactcagcttgctgcatttgaagaaactgcagaaaaattatcacggacaagtgcagcttgcggatttcgttggaattccacgattcgcaaaaagtacgaagccgaggtggcgcttgccaagaaaaaaagggctgcgaagaaaagggagcaagcaaaaacaaaggcaaagactggaacgactagcgataacgctgttatgcaaagagcaactgaagaaaaagcagtgcctgcatccaacaacatagagttagccgatgtaattgcatttttacaagggcttaaagagcaacaacatagccaagcagaagcgaaacagttacaagaagaaaacgaacgtttgaaacaagagttagaaaaaataaaaaaagaaaaacaagtaattgcagacgattaccgtgccctgttggaaattatggagcgtgcgcgaaaatggacgaacacagatggagagggcaatgtctagtggacgatgtgcacttgtcaacgaaaaaacaagccgctatttaagtgaacggcttgtttttttgattattccgcccttgcttgctcaggctttgttgtttgttcttgcaccccttgaggaaaccatacgtatgggctctcgccccggtctcgagcttcattgtaagtgataggttcgaagccaagtttgttccaaaattcgcctgtgctttgacgtgcattcgttttaactggcaggccgaagcttttggcaaagtcaacgagtgcccgcccgtaacctcgtccgcggtaaggctctagcacttctagtttccacagttccaagtagtcttgcggagggtcaaaatagcggtcgaagttgccgtcaattttgtataaactcattcgtgcaaccagtttttttccgtaataaataccataaaaaggggactcgctgtcattttcaattatactgttctttaaatcgtctttcatggaaagctcagcagcaccatattctctgaaatggcgaaactcttctaatgtcttgtagttgacgagcaagcgctcaactttaatggtcatagtcatcctcctccagtacctttactcttcctcttctattttactagaaaacaaatgaaaacgcattaaaaacaaaaaagtttgccaacgatggcaatctatgaacttggctgtgatacaataggaccaactaaaaaaagaggggtcattttgtgaacattgcagtaatcggagctggggctgtaggcttatttttggcagctagttttaagcgcccaggacaagatgttgttttagtaacaaaacgggcagaacaagccgctctattagcagaccgcggcattggagtaacagggaaaataaaagctgagaaaaacgtgcagacgcaagtaggcatcggcacgaaacgatttgacctaattgtgtgcgctgtcaaatcttatgatgtagctagcatagtagcgataggtcagtcattggcgcacgatgaaacaagatggttgtttgtacaaaatggcatgggccatttaaaggagattgccgatctaacgggaaaggtggcagtcggagtattggaatacgggctgttcaaagaaggcgacactgtagttgaggtaagaggcctcggcagtctgaaaatcgctccttttaaaagaatgacagaacaagatatcactgtcattggcgatgcagccgatgggcaggttttgcacatacaaacatttcccgaccacaacccgatcctcgaagaaaaactgattgccaatgcgtgcattaatccattaacagccattactggtgaaagaaacggcgccttcattaagcaacaaggctatatggcagcaatgaaaagcgtattcgatgaagcggtagctgtacttgggcgcaataatgacgaagcgctctggcattacgtagtagcggtatgcaagaagacagcgaataacgagtcatcgatgcttgtcgactatcagcaggggcggaagctagagcttgatgccattttaggttatcttatccaccttggcgaaaagaaacaaattgatacgccacgcttattattattgtatcaacttttgaatagaggtgagacgaaatgacggcagctgtgtctgcaattgtcgcgacatttgtcacattcccgctcttgccttggctacttatctgcttcgttttgctccgttggcaacctaagcaaaaagcaatccgccatgcgagcgattggacgctgccgtttttcttgctggctgttgtttttatatgccatgagctatggccaggacatggagcttggctcgcaatcatttttattgccgttttaacagtgtcgctgcttttgtttatgcattggatccatccgactggaacgccaaaaaagaaaacgactgcggcttggcgcagtttatttctcatcgctggccttttgtatctttttttgctaggggcggcatttttagaccgtgtcgtgtttgcttaaaggcgcaaagcaacttatttggttgcgcttgctgtttttgctatgatggaacacgataaggtcataggaattgaggggaattgaaaatgagatttgaggcgttggacacacggcgtttaacggggtttttagctgaatatgtcaaccaaccagatcaatgcagcgatctgttctcgtatagatggaaaacgaatggctgggagcaagaacggagcgaagatttggcgaagcgctctttttcccatcgtcaagcgctttgtcgcttgcttgaagcacgccatgcgccattaaggaagcgagaggcttgtatggacaacatacataaactcaagcaggaaaatgcattagtcgttgtggcggggcaacaagcagggctcatgactggccccctgtatacagcttataaagcaatgagcgtcattttactggcgaaacaatatgaggcaacgttaaaccaacctgttgtaccgcttttttggatagccggagaagatcatgacttagacgaagttcgttatgtccattatttaaaaggcgacatgtggaaaaagttgatgttaggagacgaaccgaacggagaagctgctagcacaaaagttcttcctaaaaaagagttggacacatttttggcaaagctgtttgcctctttgcctgagacgagctacacaaacacgctgaaagcaatggttacgcaggctgcagctacagccggtacttatacagaattcttcaaattgctgatgcatgagcttttttaccgtgaaggcttgctctttttagatagcaatgacccagaattgcgtgccattgaacgtccttttttcaagcaattgatacgcaaagtcgatgctttgcaagaatgccaggccgctggggaagcccgtttcgtagagaaaggctatccatctccaatcgcgacagaaaaacaaaacgcccatctgttctatacgcttgatggcaaacggcgccgtcttgattatgaagctggccgtttttatgtcagggaaaccgaacggcaatttacaaaagaggagttgcttgcggaagtcgacagccatccacaacgttttagcaataacgtcgtcacgcgcccgcttatgcaagaatggctgctacctacgcttgcttttgtcgctggacctggcgagcttgcctattgggcgacattgaaagacgtgtttgcgttgtttgattataaactgacccctattattccgagattatcggccacattcgtcccttgccgagtcgaaaagcatttgcgcgaacgcaaagaagcagcagaaacctatattttgggcgaaggagaaaagctcaaggaagcgtggcttgcgagccaacattcttatccagtcgcgcaaagggcacaagcggccgctgaagcaattgaagcagcccatctgccttttagggaactggccggagaaattagcccgacattgaaaaaaatgggcgaaaaaaaccgcgcatttattcaagggcaaattgcctttttgaaagaacggatggaacgggaaatacgggaacagcatcaagttggactgagcaaatacgatgaagcaatgacgtggctacatccgaaagatgcaccgcaagagcgaattttacattcgttcattctgttaaatacagcagggatagacatcttttcccgcttgcttgagaaaaaaccaccccatacgggcgcccatcttgttttttacgtgtaatcttgtcagcttgtgtcaatcgaaaatgtatgtgaaatcctgctccgtgagcaggattttttttaattctgtggaaaattacacgataaggtggtgaaaagtggagggttgtggtaagttaagggtagaaagtgggggaggaggcaggcaacaatgtttttaggggaataccggcatacaattgatgagaaaggccggatgattgtgcctgctaaatttagggaacacctcggcaccccttttgtgattacccgtggcctagataattgcttgtttgtttatccccaaagcgaatgggataaattggaaagtcaattaaaagaactgcctttcacaaagaaggacgcccgtgcttttacgcgctttttcttctcaggcgcaagtgaatgcgagcttgataaacaagggcgaatgaatgtaccccaaccccttagagaatacgcaaagctagaaaaggaatgtgtggtgatcggcgtttctaaccggatggaagtatggagcaagacgctttgggaagactatgtatcccagtctgaagattcctttgccgacattgccgagaacttaattgattttgatttataagataggatgggacgtatgttttcacatataacggtactgaaagaagaatctgtaaatggtctcgcggtgaaacctggaggcgtgtacgtggattgcacgttaggaggcggcggccattcagagcggattttaacggcgttagcaggcgaaggccatctttatgcctttgaccaagatgaagccgccctttcgttcgcagcagagaagctctctcgttttaaggagaatatcacattcatacgcagcaatttccggcacataaaggaagagctgcgaatgagaggcgttgacaaagtagatggaattcttttcgacttaggtgtttcatccccacaacttgatgaagcaagccgaggctttagttatcatcaagacgccccacttgatatgcggatggaccagagcgcatcgctcacagccagagaagtggtcaatacttggccgtttgccaagctccattcgattatttcaagatacggcgaagaaaagttttctaaacaaattgcccgcaaaattgaagcataccggctgaagcaaccgattgaaacgactggtgaattagtggacatcattaaagaagcgattcctgcccctgctcgacgtgcaggaggacacccagcaaaacggacatttcaagccattcggatagctgtcaatgatgaactaggcgcttttgaggatgcgttaacggatggatttgaactattaaacgaaggcgggcgcatggctgtcattacctttcattcccttgaggaccgcttatgcaagcaaatgtttaaggagaaaacgaagctgccagatttgcctaaagggttgcctattattcctgccgatcaaaaggcgccatttgccttgatcaccaaaaagccgattgtagccaatgacgaagaaataaaagcaaataaccgtgcacgctctgcaaaactgcgcattattgaaaaagaaaaacagacagattaaggaggcgtttacatgggagcacaacgacactatcaaccacatcctcagcggcacaaagaaggattgcgaaaagaaaagcaaattgtccgctatcgggcacgtattaccctcggcgaaaaaattatagctggctttttggcagcggtgctttttctcatgctcactttcattgtacataattatgcgacactctatggtttgaatgtatcgatccaaaaggataaagaagtcattagcgagcaagtactaaccaatgcaggctaccaaatgcagcttgacgaattaagctcacctgaaaatgtgcttgaccatgcacaaagaattggaatgaaatcttctggagaaaacgagtaacggttcaagacgagttcaagcgagctcgtttttcttacttaggaaaggtgtggtggaaagtggaaataaaacgggcggtgacaaatagacgtgccgtcacccttttgtttgtgtttcttggtttgttcactattttgcttggccgcatggcgtatattcaaataaccaaagaagtaaaaggccatgatttggtcgctatggcagaggcaaagtataaccgctcccaagtgctcgaaagcgaacgaggggctattttagaccgccacggcagcgtgcttgctgaagacgtgccagcttataatgtcattgctgttttatccgattcacaaggcccaacccaatatgtgaaagatccacaagagacagcgcaaaaacttgcgcctttaattggaatggaagaaggcgagttggaagcgcgtttgacggatgcgaaagaaaatggtcgttttcaaattgaattaggagcaggggcaagaaaccttacatatgagcaaaaaaaagaaattgaagagctgaatttgcctggtatcctaattcaagatacgaagaggcgctattacccgaaacaaacgtttgcttctcatgtaattggtcaccataatagcgaagacagcgcctataatatgggcttggaagcaagcatgaatgattacttgcatgccgaagacggccatatcgaatacacgagtcttggcaaagggctctcgttaggggcggggtcagaccgggtaacgttgcctaaaaatggagcagatatttatacaacgttagacacgtcgattcaggctgcaatggagcaggcaatgtcgcaagttgaggcagaatacgagcctgaaaaaatgaccgcgattgctgccgatcctcggacaggggaaattttggcgatgtcgaatcggccgagctttaatccgaatgattaccgtaatattgaaaattacttaaacttggctgtgcaggacgtggttgaaccaggctccacgatgaaaatgtttacgatcgcagcagcgatagaagaaggggagtttgaggacgacagtacataccagtcagggcggtatgaagtggacgccaattctccacctattaatgacgtaaaccgttctggctggggagaaatctcctacgctgaagggttccagcgttcttccaatgtgctcatggcaaagcttgtcctcgaacggctagggatggaacggttttactcgtatttgaagcagtttggctttactgaacaaacaggcattgacttagcgaatgaagcatcaagcaatgtcgttgaaggaaggcgtgccgatgctgcccgcaccgcttttggacaaaactcaacggtgactgcgatccaaatgatccaggcagcaacagcgatcgcaggcgacggaaaaatgaaaaaaccttatatcattaaagaagtagttgatgaaaacggcgacaagctccgggaaacagaaccagaagtggctggggagccaatctccgaggagacagccaaacatgtgagggagctgttacgtggagcggtagcagaggatcacggcacaggcaaggcatacaacattcaaggacttgaggtcgcaggcaaaacagggacagcgcaaattgctgaagacggaaaatacttatcaggccatggccaatacctttactcttttctcggcatggctcctgctgataatccgaaggtagtcctttatgtctctgtcacaaagccgaaattagatgacaacgaatcaggcaatgcccctgtctcgatgatatttaactctgttatgcagagcagcatgacgtatatggacttggagccaaatgaagaggaattgctgcaagaagcagaggagcaaggttttgaaatgcctcatctggccggtgaacgggtagacaaagcagccgaaaccattcctggtgaagtcgttgtccttggtgaaggggaacacattacggaccaacagccagcgccaggaacgaaggttcttccaggcgatcggatcgtcttgcgaacagatggcgaagtcaaaatgccagacatggcaggctggtcatcgcgtgacgtgatgaaagtagctgctttacttgacttaacaccagaatttaagggcaatggctatttacaatcccagagcatagctcctggtgagcctatagaggaacaagcccttctcgatgctgaatttgcctcgaacaatgaacgagataaacaagaggaccatgatcaaggggaagccgacgcaaatgatgagcaaacagacgaacaactcgaacgagcttttgagggagtagaggaaccggtgtctgaaggagatgaggaagcaaatacagaggcggaacagaacgatggcgatcaatctgagtaacactctcgcctttgtctatagtttgaggagcttgccaaacggcaagctcctctttgttctatcacgtggtgaacaagcataggctagaccataaacccgtccagtgcagaaagtgagggatagccgtgcgcgtatcaaacgtgactgtcagaaagcggctgctactcgcctttttcatcggtgtagccgtgtttgcgatcattgctgtccgcttaggctatgtccagttcggacaaggcgtctggctgactgaacaggcagaagattcgtggggaagaaacattccgtttgaaccaaaacgaggcgatattaccgatcgaaacggcgtggagttagctaccaatattagcgccccgtctgtcattgtttttccacggcaagtgacagacccggtggacgcagctgaaaagttggctgctgttttggaaatggatcaacaaaaagcatatgaatcgttgacgaagtctgcttcgagcgtttggctgcgtccagagggacagaaattatcgcaggaaaaagcgcaagaagtgcggagcctcaacctgcctggtgtttacattgccgaagattcaaaacgccattacccatttggcagctacctctctcatgttcttggatttgccggcattgacaaccaaggtctgacagggcttgagcattattatgacgggaagctcaaaggcgaaaaaggctatgtctcctttttttcgaccgctaaaggaacgaaaatgcccaacttggctgacgaatatgagcctcccattaatggccttaatttaacgttaacgattgacagccgcatccaaacgattatggaacgggagttggaccaggcagaagcaaagtatgagccagatggagcgatggcaatcgctatggaccccaatacaggagaagtgttggcgatgagcagtcgccctgacttcaacccggaacattaccgagaagtgccggcagaagtgtacaatcaaaacaaacccgtttggatgcagtatgaaccaggttccactttcaaacttattacacttgccgccgcgttggaagaaggtgtcgtcgatttagaaaacgatacctttcacgaccctggttacatcaatgtcgcgggaacaaagcttcgttgctggaaaaaaggcgggcatgggcaccaaacatttttagaagtcgtgcaaaattcttgcaaccctgggtttgtcgaacttggccagcgcctcggaaaggatcgtctgttcgattacattgaggaatttgggttcggccaaaaaacaggcattgatttacaaggagaaggaacaggaattttgtttaaccgcgaccgtgtcggtcctcttgagcaggcaacaaccgcttttggtcaaggggtggccgtaacgccgctccaacaagtagtcgctgtttcggcagctgtaaatggtggatatttgtatgagccttatttagcgaaagagtggacggatggagaaacaggggaggtcgttgagtcgatttcgcctgtgatgaaacggcaagtgatttccgaaaaaacatcagagcaagtccgctatgcaatggaaaatgtagtcgccaaaggctctggtaaaaatgcgtttattgacggctatcgtgttggcggcaaaacaggaacagcacaaaaagccaaaaacggcaagtacttggaaaacaactacatcttatcgtttattggcgtcgcaccaatggatgatccgcaaattgtcgtctatgtcgcaattgataaccctaaaaatacgattcaatatggtggggtagtggcggcaccaatcgcaggcgcgattatcggtgacagccttgaagcgatgggagtggaaaaaagggataaccaaattgaaaaagaattgacgtgggctgatgaaccgttggtggaagttccagatttgatcggtctttcaaaacgggatatttatgagtcccattatgatcttcgccttgatgcctcgggtgaaggcaacacggtgttgcgccagtctccccaaccggggacacgtgttgcaaaagattcaacaatccgtgtgtatatgggtgacaaaatgagcgggaacgactaaaatggatacgtatgtttttattctgctcattcatcgttttccaatacggtggactgtcaaaactttggaggcattaacatggaattgaatgaattgcttcgtgtgcttcggggcattacacctttaaaaaaagaacaccaatcgatagagattgcgcatttagaaatggattcgcgcttagtgaaacaaggaacattgtttttttgcattaatggctataccgttgatgggcatgactttgcaaagcaggctgtagaaaaaggggcggtcgccgttgttgctgagcgccctcttgcccttgacgtccctgtcgtgattgtccgtgatacaaaacgggcaatggcgcggttggcgagccatttttatggagaaccaacgaaacgattgcagctgatcggcgtgacgggcacgaatgggaaaacatcggttacgcacattttggatacgatgtttcgggaggcaggtcagaaaaccggcctcatcggcacgctttataccaaaattggcgatgaaacaattgaaacacggaatacgacgcctgaatcacttgtgttgcagcagcggtttgcctcaatggtaaacaagcaagtcgagacagcggtaatggaagtatcttcccatgccttgcatttaggtcgtgtgcgcggctgtgattatgatattgccgtgtttacaaatttaacccctgaccatattgattatcatgagacaatggaacgttacctttatgcaaaaagcttattattttcacaactaggaaatacatatgacggcaaaaccgctgtcataaacagcgatgatcctgccagcgaccggcttattcaaatgacaacggcagacgttgtcacatatggcatcaaaaaacaagcggacgtttacggggaaaacattaaagtaagcgctgcgggcacgcggttcacattacatgtttttggtgaaaaaaccgatgttcagctcaagctgattggcttgttcaatgtctacaacgcccttgctgctgctgccagcgcttatgtctcaggtttgtctctctctacgattaaggctagtctagaaaaagtcacaggtgtagcggggcgttttgaacctgttgatgaagggcaagactttaccgtgattgttgactatgcacacacgcctgacagcctcgaaaatgtgttgcaaaccgtccaagactttgcagataatgatattcatgtagtcgtaggctgcggaggagatcgcgatgcgacgaagcgtcctgttatggggcgaattgccgtgcaatatgcggatcgaacgatattcacgtcagataaccctcgcaccgaagaccctgatgcgattcttgccgatattacggaggggcttgaccccgaccaatacaccgtcattgttgaccggaaaacggcaatcgagcaagcgattgctgcggcaaatacaggagacattgtcgtgattgctggcaaagggcatgaaacgtatcaggaaattggccgtcaacggattcatttcgatgaccgagaagtggcccgcgatgcgctgaaggagcggatacaatgaagatcgatgcaagtttgctgaaatccattgcgaaaggaagccgtttgaaggaagataggcgcggcttttcgggcgtttcgacggacacgcggcagcgcatggaaaatgggctgtttgtgcctttaaagggagaacggtttgatggccatcgctttattgaacaagcgattgaagctggggcaacaggtgccctttggaaagaacaggagcccgtgcctgagcagttgccagagacgttccagctctactatgtggaagacacgttgaaagcattgcaggctttggcgcaagcgtaccgtgaaaaagtgaatccgtttgtgattggcattacgggctcaaacggaaaaacgacgacaaaggatatagttgctagtgtgctagccggaacggctgctgtccataaaacgaaagggaatttaaataaccatattggcgtaccgctcacattgttggccatgccagaagactgtacttatgcggtcgttgagatggggatgaaccatgccggtgaaatttcgacgcttacgcaaatagcgaagccaaatgcggcgattataacaagcattggcgatgctcatatcgagcatttaggttcccgtgaagggattgcagctgcaaaaatggaaattgccgatgggctcataaaggaaagctggctgttattcgacggagatgaaccattgctaagtccgtataacgaacaagcggaaacgacagttggcttttcggatcaggcggcaaccaaaataagtgacgtcaaaacgctagaaaatggctatgtcttttatttgaacggcgcacgctggcaacttacaatgctaggcaagcataatgttaaaaatgccgcttacgcgattttgcttgcgcaaaagctaggttttagcaatgccatgatccaaaaacaactttcttccttggcaataacgggtatgcggctagagaagcttaaagggccaaacggctcgaccattattaatgacgcctacaatgccaatccaacatcgatgaaagcggcaattgagactgtgaaagagctgccccattataaaaggcgcgttcttgtcttaggagatatttatgagctaggccaagatgaagaagctcttcataaaagcgtggctactgccattgagccgcctatcacagacgttgtgacagttggcaaaaaaggccgatggatttacgaggcccaacttgacaaaaaggacagccgcatttcgcttgtccatgctgatacggttgtggaagcagccgaaattttgaaaccttactatacgaaagataccgttgtattaataaaagcttcacgcggtttggcgcttgaggaagttttaccggcggtcaaaggaggcaattaatatggaagaatggacgctgttgttcgttctcattctctcatttgcggctgctgttattatgtcaccgctgtttattccctttttgcggaaattgaagtttggccaaagcatccgtgaagaagggccgaaatcccatcagaagaaaagcggtacgccaacaatgggcggcattgttattgtcttatcgattttcattagtgctctcgcgatcggcatcgccatcaccggatttactccggaattgttgttgttgatggttgtgacgcttggttatgggatcgtcggtttcgttgacgactatttaaaagtggtgcgcaagcacaatctcggcttgacctctaagcaaaagctagcaggtcagctagtcattgccgctattttctatatcggattgcttgcgatcggctttgatacatttattgcgattccaggcacgacgtttggctttgatttaggctggctctacctcattttgattgtcttaatgctgctcggggcgagcaatgccgtcaatttaactgatggccttgacgggctcttggctggcaccggctccattgcttttggcgcttttgccattcttgcttggagcggaggattcattgacacggctttattttcgacggccattactggagcgcttctagggtttcttgtctttaatgcccatccagcaaaagtttttatgggggatacaggctcccttgctcttggcggagcgattgctgcgatcgcgattctaacaaaaatggaattgatgctcattattgtgggtggcgtgttcgtcattgaaacgctctcggtcatcattcaagtagcatcgtttaaattaacagggaaacgcgtgttccgaatgagcccattgcatcaccattatgagcttgtcggttggtccgaatggcgagtagtcgtgacattttggcttgtcgggatgatctttgccattatgggcgtttacattggagtgtggctgacatgaagcaagtaaaggaattgatcggaaagcgtgttctcgttctaggaatggcgaaaagcggcgttgcttcggcattgctgcttgcccgtataggagcggaagttgtcattaacgacagtaaaagccgtgcggaccaaccacaggcaggcgaattagaggctgcgggcattcaagtggtgtgcggtgggcatccactcaccgtgcttgatggctgcagcttgctcgtgaaaaaccctggcattccttatacaaatatagtggtgaaggaagcggaagcccgtggcattccgatttggaccgaaatcgagctcgcctatttgatttcagaagcagaaatggtcgccattactggctcaaatggcaaaacaacgacgacgacattggtaaaagaaatgcttgagcatagtgggcgcaaaccgcttattgccgggaatattggcacagtagcctcggaggtagctcaaaaggcaaaagctgaacatgtgatcgtgctggaagtttctagttttcaattaatgggcacaaacgcatttcagccaaaggtagctgtttggctgaatatctttgacgcccatttagactaccacggcacccgtgaagactacatagcagccaaggcgagaattgctgccaacatgggccctgctgattatcttgtgtacaatgcggatgatccaacagtcgttcaggccattgctcgtataggcgctacccttgtcccgttttcgcgcatcaatgtcgtggaagacggcgcttatgtgaaagacggcacgatcttttttaaagatgaaccgatccttgcattggctgatgccgtcctaccaggggcccataacgtcgaaaacatgttagccgctactgcggcggctcgcttagcaggagcgacagtagaacaaatcaggcatgtgctcagtcattttcctggagtgaaacatcggcttcaatatgtggggagttgggaaggccggcagttttacaatgattcaaaggcaacaaatatattagctacaaaagcagcgctatcgggatttgcaaagccggttgttctcattgccggcgggcttgaccgcggcaacgattttgacgagctgttggcgagtctaaaatacgtcaaggctgtcgttgcatacggtgaaacaaaaagcaaactgttggcattggcagctaaagcaaatgtccaagcggttacggctgaacgggtccaagacgccacggagaaagcagtggcgctgtcacaacctggtgacgttgtccttttgtcgccagcttgtgctagctgggaccaataccgctcttttgaagagcgaggcgatgaatttcttgattacgtgaatacgatcatcaaaccatcgtaaaggcggcgaatagcctggaaaaagcaccgaacgcaaatgtatacgcatctgcatgaaatcgctccgtctgaagtctgctggaaacagcaggcttttcttttacaatgcgaatggacatgtttgccgcttcggcttcatatagtagtgttagaagtcgcatgaagccgaggtgtgtgatgggaaaacagaaatcagcccccgatttaactctacttgctgtaacgattgcgcttttagtcattggcttaatcatggtttatagtgccagtgcggcttgggcctcttaccgtttcagcgattcgtttttctttgcaaaacgacaattgttttttggcggaacaggtgttttgctcatgtttgtgatgatgcggttagactattgggtatggcgcacttacagcaaaatccttttgattgtctgttttgctttgctcgtcattgtgcttatccctggggtcggccttgtccgcggtggtgcccaaagctggcttggcgttggcgccttttcaatccaaccatcagagtttatgaaaatggcgatgattattttcctagcaaagtttctagccgatcatcaaaaatggattgtgacgataaagaaagggttggttccttcccttggccttgttttgttggcctttgcccttattatgatgcaacctgaccttggcacaggtgccgtcatggttggaacttgtacagtaatggttttcactgcgggtgcgcggatcaagcattttgtcgcccttggcttaatcggtgtgttcggatttgtggcgctcattgccagcgctccttaccgaatccagcgcatcacgtcttttatggacccgtggagtgacccactcggcagtggttttcaaattatccaatcgttgctggctatcggtcctggaggcttgctcggcatgggccttggtgaaagcaggcaaaagtatttttacttgccagagccacaaacagactttatctttgcgatattggccgaagaaatggggtttttaggcggagtgacagtgctgttgttatttgcgatcctttattggcgtggcatccgcattgcgctaggggccccagacttgttcggtagctttttagcgatcggcatcattacgatgattgccattcaagtaatgattaatattggcgtggtgacagggctcatgccagtcactggcatcacccttccgcttttaagctatggagggtcttcgttaacgcttatgctagtttccatcggtgtgttgttaaacattagccggcatgctagataatgatcggacagagagcgaaaaatgatcgctctctgtttgttgttttgtagtggcaaacaggaaaacatgctaaaatggagaaataagcaatgaaaacatcgtttcatctacgttcatgagaatatggaaacgagccgtggaaaatgatgcctgtgacttgttcgcatttcgagcagtttggaggagcataagtgagtcaagataaaaaagtggtatcggtcaatgagcggattccaacattgcaggaaaaacggaagcaaaaagcaaatcggcggattctcgcatttgttttgttgttctttctattgattgtcgttttggtttatttccaaagcccccttagcggtgtgaaaaccatacatatagacggcaaccaactcgttgctgaggagacgatcttaaaagcaagcggcctagaagagggcatgaatatttggcatttgtcagaaggggagcgtgaaaaagcgataacgtcattgaaagaaatcgaaagtgccaaaattgaacgggagcttcctgtgtccgtgcgcattactgtaagcgagtatccacgcgttggttatgttgctgacggggatacgtatttgcctctattgcaaaacggagaaacacttgaccctataccgaatggacagcttgtcggcgatgcgccagttttagtcggcttcaacgatgatgatgacgttttagcacagcttggggaagagcttgttcaaacggcacctgaaattgtcggtcggatttctgagattttgtttacgccaacaagcacacagccttctgaattaacgctgtatatgacggatggcaatgaagtcaaaacaaatgtcgagtcctttgctcaatcgatgcagccttacccgcaagtagccgctcaacttgaccctgaaaaacaaggcgttctttatatgaaaatgagcccatatttcaaagaaacagaacatgacagccaataggcattttgattcaatttttgacatcaacatgtaacgcaagcgcaatgcgatggcggttcaaagccgtcatgaactggtttgcaaagggatggtttggataaaaagtaggacctaggagccaaggtggagaaggttttggcttttcaccttctccatcttggtgtagactaaatagaaagagtcttgccaggcttacttttatacataagaaactgcgagatttaaaggattccataaatgcatgttgaatactttacgtactggaaaaaagaaccgaatttaaagaggagacaccatgactttgcagatggggaggtgccgtggtgagcagtgacacttatgttagtttagatattggaacatcctctgtacgggtcattgtggccgaagttgccaatggctcaatcaatattttaggggttggtaatgttccatccgaaggaattaagaaaggcacgattgttgatatagatgaaacggtgaaatcaattgaacgtgctgtagaccaagctgaacgcatggtcggcattacgattaagcacgttgtcgtcggcgttaacggcagccatgtagagctattgccgtgccacggggttgttgctgtttcttcaagcgatcgggaaattggcgtggaggatgtccgccgagtcatggatgcggcacaagtagtatccatcccgccagaacgggaaattatcgatgtgatcccaaaacaatttatcgttgatggccttgatgaaattacagatccaaaaggaatgattggcgtccgtttggaaatggaagggacgatgattacaggtgccaaaaccgttctccataatttgttgcgttgcgtggaacgggcaggcttggaagtggctgaaatttgcttgaatgggctggcaacaggtactgttgcggtttcaaaagatgaaaaaagcctcggcgtttgtgtcatcgacattggcggcggctccacaacgatttctgtctttgagcaaggcacgctggcggctacttctgttttgcctattggcggtgaccatattacaaacgatttggctgtcggtttgcgcttgacgacagaggaagcagagcgcattaaatgcaaatacggccatgcgtttatcgaggaagcatcctccgatgagcaatttgcgatccaaacggtaggttctaatgaaaaagaaatgcttacacagcttgatcttgctcatattatcgagccacgggtcgaggaaattttagaactgtcggcaaaagagctcgtccgcttagggtttaggcattttccgagcggtttcgtactgactggcgggacagtgatgctccctggcgtgcttgagctgacaaaggacatgctccaaggcaatgtccgtgtggccatcccgaactacatcggcgttcgggaaccgaaatatacggtcagcatcggtttaattcagtttgcccataaaaatggacgcgttcaagggaaggaagttgctgcggcattctcgcaggcatcagaggctgaaacagcagactctagtgaaaaccaccaaccacttcggacgactgagcgtgaaccgaaacgccaggaagcaaaaagagaatcaaaaatgaaaagttggtttaaaacattctttgaataagaaaaagctgtcagccagtctggttagggggaaataacatgtttgattttgaaatggatatggaacaattagcgcaaataaaagtgattggcgttggtggcggcggttcaaacgcagtcaatcgcatgattgaaaatggcctgcaaggtgtcgattttattgcagtcaatacagatgcacaagcactccatttatcaaaagcggaaaagaagttgcaacttggcggcaaacttactcgcggccttggcgctggtgccaacccggaaataggcaagaaagcggcagaggaaagcagagaacagttggaagaagtgcttacaggttctgatatggtctttattactgctggaatgggaggaggaacaggcaccggagcagctcctgttattgctgaagtggcaaaagagcttggggcattgacagtcggtgttgtgacacgtccattctcttttgaaggccgtaagcggcaaaaccaagcgatctctgggattgcagcgttaaaagaaaaagtggacacattgatcgtaattccaaatgaccgcttattggaaatggtcgataaaaatacgccgatgcttgaagcgttccgcgaggcggataacgtgttgcgccaaggagttcaaggcatttccgatttaattgccacacctgggttgatcaaccttgacttcgcagacgtcaaaacagtcatgagtgaaaagggttccgctttgatgggcattggcgtcgctacaggtgaaaaccgtgcggccgaggcagccaaaaaagcgatctccagcccgctgttggaaacgtctgtcgatggggcacaaggagtgctcatgaatattacaggcggcacgaatttaagtttatatgaagtccatgaagcggctgaaatcgtttctgaggcttgtgacgcagaagtgaatatgatatttgggtcgatcatcaatgaaaatttgaaagatgaaattgttgttaccgtcattgcaacagggtttgaagaaacggcagaagcaaaacaaccacaaagccgtacgatgcaacaacaacatgcgaggccgcaaccgaaagaagagccaaaacgtacggaaagccgccagcaggcgaggcaaaaagaagaacagccagatacactcgatattcctacatttttgcgcaatcgccgcaaccgctaatcgcgaagaagcggttgctcgtcaaaccgaatcgtctatttgctcctagtgtctttgacactgagactaatagataactgtaagaaaaccgctgcgaaagcagcggtttttttgcggttatttccgagcgaccgagaatgggacagcgtttgccaaaacttatcaaaataacatccttgcttgcgccataaagtgacagactttcttatgaagatctactatactaaattctatcactgtgagggagcaagccaatgaccgtttacctcgatttgatctggttgttaaatgcagggattgactacttgctgcttgcggctactgcccttttgttaaaaaggcgttttagccaatggcgccttgtcttggcggcgttgtttgcatcgttgattgtctttttaatgttcacccctgctgcgccattgtttttgaatcctgttattaaacttatttattcggggctaatcgtattcattgcatttggctacaaacgtttttctttctttctgcaaaatctggcaagtttttattttgtcacctttgtgaccggaggcggcttgtttgctatgcattatttcttcgaaaccaatgtcgacgtgctggcgtttttgccaggtcatggagtaggcggaagcatggtcagttgggcatttgtgcttattggttttccactcgcactctatttttgcaaacaacaatttggggcagtgaaaaccaaacagtttcatgcgagccagctggcagaagtggagttttggattgaagggatatccttttccgccccaggattaattgatacgggcaaccgtttaagagatccgctaacgaaaatgcccgtcatggttgctgaggcggcactgctttacagtgcttttggcaaacagcaagtcgacgcacttcttgagttggaagctgaaaatgaaccgtcaccgctcatgaaacgggtgcggctgattccttaccgtgccgttgggcaaggaagttcttatatggccgctgtaaaacctgatcgtgtgaaaatccgttaccaaaatgaggcgtatgaaacgaatcatgtcttgattggattatcccgtgagacgctatctccagaacagcattatcgttgtattgttcacccccaaatcatgcacgaatatgcaagctaaatagcaaaaggaggaacgtttaatgattaagttgaaactgcagttgttttggtaccggcttctaaacaagttagggttaaaagcggatgaaatttattacataggcggaagcgaggcattgccgccgccgttgtcgaaagaagaagaggctgaactattgggcaagctcccaagtggagacaaagcggtccgttctgtgctcattgaacggaatttacgcttagttgtctacattgcccgcaagtttgagaacacaggcatcaatattgaggatttgattagcatcggcacaattggcttaatcaaagcggtcaacacctttaatcctgaaaagaaaattaagctcgctacgtatgcctcccgctgcatcgagaatgaaattttaatgtacttgcggcgaaacaacaaaacacgttctgaagtatcgtttgatgaaccgctcaatattgattgggatggcaatgagctgctcttgtccgatgtccttggtacagaagaagacattattacgagagggattgaagaacgcgtcgaccgccgcttgcttgtcaaggcgctccatacgttatcggagcgggagaaacaaattatggaactgcgttttggcttagctggagaagaagaaaaaacccaaaaagatgtcgccgatatgctagggatctcccaatcgtacatttcccgtttagaaaagcgcatcattaaacggctgcaaaaagaatttagcaaaatggtgtaagacagaggactcccaaaatggggttcctccttttttatttcacaaaaaattttttccaagcttcaacagcgtcgtgtcaaaggcccattctttctaactcatgtgagcgggttttttgtagtgcatattttttttgcccagggagatactttttttgacatcatcttccgtttagggggtaaggaatgtgactcgaaataaagtggaaatctgcggcgttgacacgtcgacgttgccagttttaaagaacgctgaaatgcgggagttgtttacgaagttgcaagctggctatgagccagcgagagaaacgctcgtaaacgggaatttgcgcttagtgttaagtgtcattcagcgatttaataaccgtggcgagaacgtagatgatttgtttcaagtcggctgcataggattaatgaaatcaatcgacaacttcgatttaagccaaaacgtcaagttttcaacgtatgcggtccctatgattattggggaaattagacggtatttacgggacaataatccaattcgggtttcacgctctcttcgggatattgcctataaagcgctgcaagtgcgtgaccaaatgatggcggaaaaaaaacgggagaaagaaccgaccgtccaagaaattgctgcagtactagaggtgccaaaagaagatgttgtctttgctctagatgcgattcaagatcctgtctccttgtttgagccgatttataatgatggcggcgatccaatctttgtgatggaccaaattagtgatgaacgaaataaagatataaactgggtagaagaaattgctttaaaagaggcgatggtccgcttaaatgaccgcgaaaaaacgattttgaacatgcgtttctttcaaggaaaaacgcaaatggaagtagccgaggagatcggcatctcacaagcgcaagtgtctaggctagaaaaaggcgcgatccaacaaatgaataaacatatcgaatcatgaaggctaaaatcgattttgattttagccttttttgtttggagttgctgctagactctactttttttcatgccaggctgtaagcgcgcatacgttttataaatggataacaggagggaaaaggagcatgcaaaaaatttcggagctatcgcaaaaagatattgtcaatatggaaaatggcaaacgcctaggccatttaaatgatttggagatcaacttggaatcagggaaaattgaagcgattgtcattgctggcactgggaaagtcatgcagctactagggcaacgggacgcagcagaattggtgattccgtggaaaaacattgttaaaattggttctgacgtgattttagttgaagtgcctgaacgttatcagccaaaaagggtcgctagcccgatggaggaggcaaggaagaaaggataagttttgtttcttgtatggcatgccttgtgataaactaagaccataaaggaattgcaactagtcggggggattccatttaatggttgaagagaaatgggaaaagcggagtgagcgcgtgctggcggcaaccgttttttcaaacgttatgccgggcatgtttgctggatttacaacacggcacggaggcgtaagcaaacgtccttatgccacgttgaatatgggctttcatgtgggcgacgaccaaaacgatgtacaaagaaaccgcagtcttgtggcagcagatatagggtttcccctaacaaaatggattggttcagagcaagtccaccaagcagagatagcggaagtgacggcggcagatgctggcaggggcgctgattgcctagaaacagcgcttcctggtttagatggcatttacacgcaagaacaggggttgttgttgacaagcctgtatgcggactgtgtccccctatactttgcagcaaagtcggccggtctaatcggtctttgccatgctggctggaaagggagcgttgccaaaattggcccgaaactgctaggcatctggaaagaaaagcattgcgtttccgcaagcgatgtccatgtgttaataggccccagtatttgtgcttcccgttacgaggttgatgaagtggttgcttccaaagtaaaggatgccctcggcggcgaagcggctggtgtgctgacgccaaccaagcctggacatagcctgcttgatttgccgatgttgaataagcagctcctagtcgctgcaggtgttaatccatctcatatacatacttcaaacgtatgcacgtacgaaagcgatgcgtttttctcccaccgcaaagaaaaggggcggacgggcagaatgatgagcgcaatcgggttacaaaaagggtgaaaaatcagtgagtgtaaatgttgcagaaaacgtagcaaacataaaaatgcgagtcaggcaagcatgcgagcggagcgggcgcgctattgaggatgtgcgcatcatcgctgtcacaaaatatgtctccgttgccactgccaaacaagcggtggaagcgggaattgccgatataggtgaaaaccggattgaaggggcactcgaaaaagcagctgccattggccaagcacggctccattttgtcggttcgctccaatcgagaaaggttaaaaacattgtcaacgttgtttcatgcatccattctttggacaggttgagcttggcaaaagagattgacaagcgactcgagccaggaaagaccatcgattgttttgtacaagtgaatgttagcggcgaacaatcgaaaaatggattagcgccagatgaagtaaggccatttataaatgaactggccgcttatccagccgttcgggtgatcggtttgatgacaatggccccttttgaacaagatgcagaacgaacgaggccgattttttcaaagctcagagagcttcgcgaccaaataaaggcggacaagctttcatatgccccgtgcacggagttgtcaatggggatgtctaacgattttgaagttgcaatcgaggaaggcgcaacgtttatccgtcttggaacgtctcttgttggcaaagaggagtcgtaaaaaaggagaggaaggccatgggctttaaaacaaagttcaagcgttactttaacctagatgaccacgttgaagaagtcgagcgttatgtagaagaacctgaacagcgtgacgaacgccctgcgcttgagaagggaagggcaccgaaagaaaagcagactgcagggatggaacaaaatcaaaacattgtaagcttgcaaagtgtgcaaaaatcagcgaaaatgatattactggaaccgcgctcttatgacgaagctcaagacattgccgaccatttgaaacgacgcaaggcggttgtcatcaatttattgcggattgaacaagagcaagcgttaagaatagtagattttttaagtggaaccgtttatgctattggaggagacattcaaaaaatcggaccaggcatttttctttgtacgccagacaacgtggaaatcactggctcaatcagtgattgggtcacaagacaaacagatagcacggtatgaggaaagtaggtgacggaatcacaaatggaaacaatggtcaactttatttttaacttgcttcaaaatgccgcctttttgtatttgatagcgattttcatttacattctaatgtcatgggtgggcggccgcgattcggctttcgggcaagtacttgggaaagtggttgatccctatttagatatgtttcgtagctttatcccgccacttggcatgattgatttgtcgccagttgtcgccattatcgtcctcaacttggcaaggcaagggctttaccctttgcagcaaatgattttgtcgtggctgtaggtgggacttaaaatgtatgaacactttcgcgaagaagagcgcccgtttattgaccatattcaaactcttcgtgaacaggcaacccgctatcatcaagaaaagttaactggttttcttgatccgcgaatgcaagaagttgcgaagtccgttattggccaagacggagagatcgatttgcagttttttggcggagccgatggatgcgagcgcaaacgtgcgtccattcgccctgcttacttaaaaaatgagccaatcgattgggacatttccctttttaaagccgcctacgcgaataaatttgtgacgcttacacatagggatgtgcttggcgcattaatgaatacaggcatgaaacgggaaacgttcggcgatatttccgttacggataatgcgttttatgtcgcctgtacgaaagaggcaagtgcttatatcgccattgcgcttaagcaagttggcaaggtaaccgttactttagaagaaaccgatacgcttgagttgcctgacgagaagtgggaagagaagccagtgactgtgtcctctctgcgcttagatgccctcttgagcgctttgtatggcctatcaagagcgaaagcggctgacttgatcggcaaggggctcgtgaaagtcaactggaaggtagtagaacatcctagcttccgcgtggcgattggcgatgatttgtctgtaagaggggctggccgggctaaagtattaaagcaagaaggcgtgacaaaaaaggacaagtaccggctagtgcttggcaaaaaaagctagttttacatagcgtgacgaggcaaaatggaggattttccgcgaaaaagaaggaataagcaaagacgatgtcgaaaaaaataaatggatgatgagtctgtgatggaggtggctgcgttgcctttaacgccgttggatattcataataaagaatttacccgtgctttccgcggatatgacgaagatgaagtcaatgagtttttggaccaagtcattaaagactatgaagcggtgctgcgtgaaaagaaagacttgtttgagcaagtaactgcgcttgatgaaaagctttcccattttactaatattgaagagacgctaaataaatcgattctcgttgcacaagaagcggccgacgatttgcgcagcaatgcccaaaaggaagcgcagttgatcgtgaaagaagcagagaaaaatgcgaatcgaatcgtgaacgaggcgctttcaaagtcacggaaagtcatgatggaaatggaagagcttaaaaagcaagcatctgtctataaaatgcgcttcaaaatgttgattgaagcacaaatggaaatgctgcaaacggaagactgggaacagtttgctgggaacgaagattttgacgaagaggaactgctaaaagaacaagaagagcaggaaaacgtataaccagttgcattttctgggaaccgtccttataatgaaaccataaaatgaatgaacgttaaaaacaaggatagggacagtgggcaatcgcgtacatgccaaagcgagccgggagtggtggaagcccggtgcatgggcttgccctgaatcgcccttgagttctgcctgcgaaccgcacatatgtttatccatttgtgctagtagtggggtgcgtgctgcctacgttaacggcgtgaagtggaaaaggcgctagcgctttttctatgagggtggtaccgcgggaaaaccttctcgtccctttttgggacggggaggtttttgtttttaacaaataaaggagcgaaaacggtggattataaacaaacattactaatgccgaaaacggcgtttccgatgcgtggcaacttgccaaatagcgaaccgaaacgccaagaacaatgggaagagatggacatttataaacaagtgcaagaacgcacagaaggccgtccttactttgttttgcatgacggccctccatatgcaaacggtgatattcatatggggcacgcacttaacaaaatcattaaagactttatcgtacgctacaaatccatgtctggcttccatgccccatatgttcctgggtgggatacccatggcttgccgattgaaacggcattaacgaaaaacaaaaaagtagaccgaaaatcaatgagcattgccgattttcgcaagctttgcgaagagtatgcacttgagcaaataaatagccaacgccagcagttcatgcggctcggcgtccgcggcgactggtggaagccctatattacgttggaaaaagaatttgaagcggagcaaatcaaagtcttcgggaaaatggctaaaaaaggctatatctataaaggcaaaaagcctgtttactggtcgccatcttcggagtctgccttagcggaagcagagatcgaatactacgacaaacgttccgcttccatttatgtcgcctttcaagttgcagatggaaaaggggtattgcctgaggatgctgctttagttatctggacgacgacaccatggaccattcctgcaaacttaggcatcaccgtccatcctcaattggaatacagcgtcgtgcgcacgggcggccgttcatttgttgtagcaagcggtttgcttgaacatgtccaaacggaattaagttgggaagatgtggttgttgaaaagacagtcacaggaaaagaattggactatattgtttgccgccatccgttttatgatcgtgactccattgtcatgaatggtgagcatgtgacgttggatgctggtactggctgtgtccatacggcccctgggcacggcgttgatgactttgttgtcggccaaaaatacgggctagatgtgttatgccctattgatgacaaagggataatgacgagtgaagcgccaggttttgaaggtgaattttatgacaacattaacaaaatggtgactgagaaactagaagcagtaggcgctctgttaaagctcgggtttattactcactcgtaccctcatgattggcgtacgaaaaagcctgtcattttccgggcaacgtcgcagtggtttgcctcaatcgccaatattcgtaaggaattgctacaagcggtcgcaaatacagaatggattccagcgtggggggaaacgcggctgcataatatggtccgtgaccgtggcgactggtgtatttcgcggcaacgtgcgtggggcgtgccaattccagttttttatggcgaggatggcactgaaattgttagcgaggaaacgattgaacatgtctcgaacttgttccgtgagcatgggtcaaatgtctggtttgaacgtgaggcgaaagacttgctgccgccaggattcacttctccgcacagcccgaatggccattttacaaaagaaaccgatataatggacgtttggtttgattctggatcgtcgcaccaaggcgttttacgggaacgaaatgaccttgtgttcccggcggacctttattttgaaggcagcgaccaataccgtggttggtttaactcttcgctatctacttcggttgcaattaatggcgttgctccgtataaaggggtgctgagccatggctttgtgatggacggcgaaggcaaaaaaatgagcaagtcccttggcaacattgttgtgccaaataccgttatgaaacagcttggcgcggacattctacggctttgggtggcatctgtcgattatcaagccgacagccgcgtgtctgattcgattttaaaacaagttgccgaaacataccggaagatccgcaatacattccgctttcttcttggcaatttgcatgattttgacccgaaaatcaacgctgtcccacgggatcaactaacaggcgtgcatgcgtttttgcttgtacgtttaaatgagctaacgaaacgcatgcatgaaggctacaatgagtatcagttcttaaatgtctataatcacttccgcaatttttgcacggtggaattgagttccttttatatggacatttcaaaggatacgctttatatcgaacacgctgaccatcctgagcgccgcgctttccagacggtaatgtatgaggtagtgacggcactgactaaactgattgccccgattttgcctcacacggcagatgaagtatgggaaaacattcctggcgtcagcgaacaaagcgtacaactcacggatatgccaactgccgaagaattaagcggtacagatgagttaaaagcacactggcaagcctttatggatatccgagcggatgtgcttaaagcattagaagtagcccgcaatgagaaagtaattggtaagtcgctgcaagcatcgttgacgctttatccaaataagcaagcacgtgctctgcttgaagcgaccgaaggcttgaaaaaactattcattgtctccaatgtacaaatcgctaatgaaggcgacgaagtgccagcagctgcacaacaatttgcggatgttgctgtgcttgtggaaaaagcggaaggcgaaacgtgcgagcgttgttggcaagtctccaatacagttggagcagatgaaaagcatcctactttgtgcttgtcatgtgcccaaaccgttacgaaccactacaatgacgtcgtttaaggcaacgatcagcttgtgtccacatcccattgaacgaggagtcttgagctagtcgagtgtacactcgactagcttttttcgtgttcttttgtatttctgatctggttagatttgcttgggcaaaaacggctgtttttggtgatgctaatttcaagaagggggatgttagcatggatcaaaagtggttaaaactaaaacaagcattacaacaacaaaagcacgagttagaacaaacacttgccaatcaaatcaatgaccatgatacaggggaactatcacagtatgacaaccatcctgctgatacagcaacggacttattcgaacgggaaaaggaccaagctgttcacaatcatataaaagatgaacttcatgaagtcgaacatgcgctggaaaaatttaacgatggttcgtacggcatttgcgagaagacagggaaagcgattccttatgagcgcttggaagcttatccagcagcgagaacggtagtggaagaaagcaggccgtttgaggagtaccgccctgttgaggaagatgtcttaaaagggtttgaagcttataacaatgatgataaggacgctaccttttttgacggcgaagacgcataccaatctgttgcccgtttccatgatacatcgccggaatatgacgaggaaacaggggatacggacgagtatggcgcaaacggagtagaggcatatgaaggcttcttatcaacggggatagacggttatcatggccctgacagtgtccaaattgaacgcaacgaccattacaaacgatatcgccgcgactaagattgctcaccgctagcgggcgcttacaaataagtagacgctcgcaaacttcatataagcaagaattgacttagagttgggcagtgtcgaaaggtcgctcgtttttggcacgacgcgcgcgtttgctttaatctgaagcggacattttcatggatttatgctacacttaccctatgtatatgaagtgggggaaaagcaatggcatacatagtggcactgatcattatcgcattagaccagttaacgaagtggctagtcgtaacttctatggagttgggcgaacgaatcccgattattgatcaagtcctttacctatattctcatcgcaatacaggagccgctttcggcattttgcaaggccaaatgtggttcttttacgtcgttaccaccatcattgttggtgtgatcatttatctcatccaaacagaagcaaaaggcaaccgcttgttaaaaatcgctctcggacttgtgctaggaggggcgattggcaatttcattgaccgccttttacggcaagaagtcgtcgattttatcgatacatttggcgatttcccgatttttaatatcgctgattcagccttgaccattggcgtcggcctttttttactaaacatattgattcaagggcgcaatgaaaaaaggagcacacgataaatggagcaatggatcattacaaaagaacaccacgaacagcgtattgataaagtggtcgttgatttgcacggacaagcatcgcggacagcggttcaacgctggataaatgaaggagctgtgcttgtcaatgagaaaaaagtcaaaacaaattcaaaagttcagcaaggcgacaaagtcacgctgacagaaccagcagcccaggaagtggaacttttaggggaagatatcccgttagacgttgtttatgaagatagcgatgtgatcgtcgtcaacaagcccaggggcttggttgtccaccctgctcctggacatgagagtggcacgctcgtcaatgctctgttgtttcattgcaaagacctctcaggcattaatggggaaattcgtccagggattgtccaccgtattgacaaagatacatcgggtctcattatggctgcaaaacatgacgctgcccacgagcatttggcggcccagttaaaagcaaagacgactgaaagacgttacaaagcaatcgttcatggcgtgatcccacatgcaaaagggacgattgacgcaccgatcggccgagacccaaaagaccgccagaagatggctgtcacccatgtcaacagccggccggctgtgacccatttttcactggaggaaacgttcaaacaatatagttatatatcttgtgaactggaaacgggacgaacacaccaaatccgcgtccatttcaactatattggccatccattagcaggcgatccgaaatatgggccgaaaaaaacgctcccgatcaatggccaagctttgcatgcggaaacacttggctttacgcatccacgaacaggggaacgactccgtttttctgcacctctcccagcagagatggaaaaattgctcgttgatttgcgaaatgcccattgacaaccattgactagtttgcaataatgattgagatagaaaacgtcctttaaacgagtcctgtgaggctggcaaggagacggaatggcataggtgaagtatgccaaaaatccctgctgcctttaggacagcagggattttttgtacagaggaggggatcgcaatttcgagaatcattttagatggcgatgcgattcgccgcgcgattacacgaatgtcccatgaagtgattgaacgcaacaaaggcgttgataactgtgtgattgtcggcattaaaacacgtggtatttatctggccaaacggctagctgaacggattgaggaaattgaagggcaggctgttcctgtcggcgaagtcgacattaccctttaccgggatgacttgacgccgtcgacatcaaacaatgagccacttttgcgcggcaccaatattcccgttgatgttaccggccgtaccattattcttgtcgatgatgtcctttatactgggcggactgtgcgagctgctctggatgcactggtcgatcttggccgtccagcatcgatccaacttgctgttcttattgaccgggggcaccgggaactgccgatccgtcctgattatgttggcaagaacgtgccgacctctaaaaaagaacgaatctcggcgcaactacgggaagtagacgcccaagacactgtgacaattatataaaccctctttaaacgcagtccagtgaggctggcaagaggaccgaaacgcacgctgttttttgcctgcgcttctttcttgccgcctcctgtgcttgcacaggaggttttttattagcttaggaagcgaaggagattaattatgaagcaaacgaacatgagattaggcatcaaagaaattccacgccctggagagtggctgctgtttagcttacagcatttatgcgccatgtttggggcaactgtacttgttccctttcttgttggcatgagcccggctacagctcttttttcaagcggtctcggaacacttgcatttattcttgtcacaaaagggcaagttcctgcatacctcggctccagctttgcttttatcgtgccactgacaacctcgcaggcacttggcgggatagagggagcgatggtcggcagtttctttgccggtttggtatatgggattgtcgccctgtttatcaaattcgctggtacaggctggattacaaaagtattgccgccaattgttgtcggcccagtgattatggtaattgggttaagcctagccacaaccgctgttggaaatgccatgtatttgcctaattcagaagaatatagcctcgttcatatcgctacggcaggcgtcactttattcgtagctgttgtcgcaacgatgtatttcaaaggatttctaaacttaatcccgattttgttaggcttaattgctggctacttgttcgccctttggcaagggttgattgatttagaaccgatccgcacagccagctggttctctgtccctgaattaatcgttccatttgtgacgtattcgccaacagttaactgggccattgttgcaatcatggcgccagtggctctcgtaacgctcgcagaacacacgggccaattgatggtattaagcaaagtagctggcaaaaactttcttaagcaaccaggaatgcacagaacagtgatgggggatgggttggcgactatgattgcagccgcagttggcggtccgccaaataccacttacggcgaaaacgtcggtgttgtcgccatcacgagagtgttcagcatatttgttgtcggcggcgccgcggtgttggctatcgcattcgcctttgtcggcaaagtagcggcattgattagttcgattcctccagcagtaatgggcggtgtttcgatcctcctatttggcattattgcctcggctggcattcgaatgcttgtcgataatcgagttgacatgggtgaaaaacgaaatatggtgattgcttccattatcctggtgattggcattggcggtgctgcggtccgctttactgattcgtttgaaattgccggcatgtcccttgcgacggtcatcggccttattcttcacgggttgttgccgaaccgcagtgttagttacggacaaaaagacatgtttgaatcagacgccaattaaaagcgctgattcgcgcctaattgttgccatagacgtttgcttaaaaaaaggaggccgactacatgttaagcgcacaaatcgagaaagccacacaaaaaggcttgtgcacgatgaatgagatgggcgtaagcgaggtgttagacctcctaaaaacggctgaatcatttgcggctggagctgtttggaaaccaaggatgcaactgtttgtggcgaacttgttttttgaaccgagcacgagaacccgctttagctttgaagtcgctgagcggcgcctcggcttagaagtgctgcaattcgatgggcagcacgcgagcacgcaaaaaggagagagcctgtatgatacagcacgtacactggaatcaattggagcaagcgcgcttgtcattcgccaccgccaagacgcttactttcatgagttaaagggactgtcagtgccaatcattaatgcaggcgatggctgtggcaaccatccaactcaatcgctgcttgatttattaacaatcaaacaagaattcagctcgttttcaggcttacatgttgtcattgctggtgacttggctcatagccgtgtagctcgctccaatgcagacattttgacaaggctcggcgctcgtgtatccgttgctgggccaattgagtggatgggtgagtttacagatacgtacacgcacgtctcaatggacgaagctgccagacaagcagatgttctaatgatgcttcgcgtccaacatgaacgtcatgatggcaacgcgctattttctaaagaggcgtaccatcaagcatatggtttaaccgaacaacgtgaagcactaatggcaaaacaaagtatcatcatgcaccccgcacctgttaaccgagacgttgaaatcgcgagcgtgctcgttgagtgcaaacggtcacggatttacaaacagagcgccaatggcgttgccgtacgcatggctgtgttaaagcgggcacttgcataacagcgattagactacaaaaaaggggatgagcgacaatggcaatgaaagtgactggtgggtttattcttgacgaaaatggcgaacaagtagctaaagatgtgtatataaaagacggaaaaattgttgagcatgttgctgatggggacattcgtgaacaatttgatgcaacaggtttgttgatcagcccaggttttgttgacgtacatgttcatttgcgtgaaccaggtggcgagaagaaagaaacaattgaaacaggaactaaagccgcggcacggggtggctttacgacagtggcagctatgcctaatacgcgccctgtccctgacaatgctgagcaattggacctgttgcaagcgcgtatttcggaaacggcagtggtgcgcgtgcttccgtatgcttcgattacaacaaggcaacttggccaagagttaacagactttaaggcattaaaagaagcgggggcattcgcttttacagacgatggcgttggcattcaagaagcagggatgatgctttcggcaatgaaagaagcagcagcattaaatatggcagttgtcgcccattgcgaagacaattcacttataaatggcggcgctgttcacgaaggccactatgcaaaagtacacggcttgaatggcattccctctgtttgtgaagccgtccatatcgcccgcgatgtgttgctggccgaagcggctggtgctcactatcacgtctgccatgtttccacaaaagaatcggtgcgtacgatccgtgatgcgaaaaaagcaggcatacgcgtaaccgcagaagtgacaccacatcacttgcttttatgcgaagacgatatcattggcaaagatccgaattttaaaatgaatccgcctcttcgcgcaaaagaagaccgtgacgcattagtagccggtttgctcgatggcacgattgatttcatagcaactgaccatgcgccgcatacagcagaagaaaagagtgcttcacttgaacgggcgccatttggcatcgtcggattggaaaccgcctttccgcttttatatacacattttgtcaagccaggaacgtttacgctaaaacagcttatcgattggttgacagtcaagccggcgcaaacatttaatcttccgtatgggacactccaagttggggcagcagccgatctaacgctgattgacttaaaggcaaatgaaaccattgatccaagtatgtttttgtcgaaaggcaaaaataccccttttgctggctgggactgtgcaggcatcccacaagcgacgatggtggcaggaaaaactgtgtataaaaaggagcgtatcaccaatgaataaactgcttgttcttgaagacggtacagttttaagaggagaaggatttggcgctgatgtcgaaatgagcggggaagtcgtcttcaatacgggcatgactggctaccaagaaattatgtctgatccctcttattgcgggcaaatcgtcatgctgacctatccgctaattggcaattatggcattaaccgcgacgattttgaatcactgcaaccagcgattgccggattgattgtgcgtgaaatcgagcacgaaccaagccattggcgcaaacaagaatcgctgcacgacctacttgccgccaaaggcattcctgggattgctggcattgatacacgcatgttaacaagaaaaattcgcgcacatggcacacgccgtggccgcatttgcgatcttgatgtagacgtcgaacaagtggcaaggggtttgcgggaaagcaagccgcttactgaccaagttgcccgtgtatcaacgaatactgcttaccatgtaccagggaaaggcatgcgggttgctttaatcgattgcggcatgaaacatggtattctgcaatcactcatcgaccgccattgtgatgtcgtcgttgtcccttacaatacaggtgcagatgagattaagcgccttggcgtcgatggtgtgcttgtttcaaatggaccaggcgacccagaaaatgtccctgagacagtggaaacagtcaagcaactgcttggcgatatccctcttttcggcatttgcttaggccaccaattgctggcgcttgcttgtggagcgacgacgagcaagatgacatttggccaccgtggttccaaccaccccgtacgggagctcgctactggacgaattgacattaccgcccaaaaccacggctatacagtcgatgctgggtcattggaagggactgcgctcaagctcacacatgtggctgtcaatgatggctccgttgaaggccttcgccataaagaagggcatgcatttagcgtacagtatcatccagaagcatcgcctggccctcatgacgccagccatttatttgatacgtttatccacatgatgaccgaaaaaaaaggaaaagtttacgcataacagctaggagcgtgtgaatatgccaaaacggacagacttaacaaaaatacttgttatcggctcagggcccattgtaattggacaggcagcagagtttgattatgccggaacgcaggcatgccaagctctgaaagaagaagggtatgaagtcattttaattaattcgaacccagcgacaatcatgacagatacagcaatggcggatagggtttatattgaaccgctcacgcttgaatttgttacccgcattatccgcaaagaacgccccgacggccttttgccgacattaggcggacaaacgggcttaaacatggcgcttgaattaaaaaatgctgggattcttgagcagtatcaaatcgagctgctcggcacgaaactagatgcgattgagcaagcagaagacagagaacaatttcgggcgttaatgaacgtgcttggcgaaccagttccagaaagtgaaatcgtccatacgcttgacgaagcgttcgcctttgtcgaaacgattggctaccctgtcattattcgtcctgcttatacgcttggcggcactggcgggggggttgcttataatgatgaagatttagcagaaatcgttgcgagcggattaaaatacagccctgttacacaatgtttagtcgaaaagagcattgctggctttaaagaagtagaatacgaagtgatgcgtgacagcaaagatgaagccatcgtcgtctgcaacatggaaaactttgatcctgttggcgtccatactggcgattccatcgtatttgcacctagccaaacgctttctgataacgactaccaaatgttgagaaattcagccctttcgattatccgcgctcttggcatagaaggtggctgcaatgtccagtttgcccttgatgcacacagcgaccagtattacatcattgaagtcaacccgcgggtgagccgctcttcggcgctggcctcgaaagcgacaggctacccgattgcgaaaatcgcagccaaaattgcagtcggctaccatttggatgaactgaaaaatccagtaacagaaacgacgtatgccagctttgaaccgagccttgactatgtcgtcgcgaaaataccgcgctggccgtttgataaattcgaatcagccaaccgcaaacttggtacgcaaatgaaagcgacaggagaagtgatggcaatcggccgctccttggaagaatcgcttttaaaagcaattcgctctctagaagctggctatgatcatttgttcgatgaacagttagaaaagaagccggaagacgagctattagaaaaaatagcaaaagcagacgatgaacggctgtttgcgattggcgctttgctgcgaaaaggcatttcagtagagaccatttatgaaacgacaagcatcgaccgctttttcttgcaaaagcttgcgcgtattgttgctctagaagagacgataaacgaggcccgtagcaatgaggcgatgttattgcgcctgaaacgtgctggcttttcagattcctacattggccgcaagtggggcagtgaagagaaagatgtttttgcagtaaggcaacaggcaggaattgtgcccgtatataaaatggttgacacctgtgcagcagaatttgcttcaccaacgccttacttttacagcacctacgaacaagagaatgaatcacagcggacagaaaaagagagcattcttgttttaggctcaggccctatccgcattggacaaggaattgagttcgactatgcgaccgtccatacagtatgggccattaaggaagccggttatgaagccattattatgaacaacaatccagaaacggtgtcgacagacttttctacttcagacaaactctacttcgagccattgacagttgaagatgtgatgcacgtcgtcggtttagagaaaccaaaaggcgtgattgtccaatttggtgggcaaacagctattaatctagcagccgctttagcagagcggggcgtttccattattggcacaacgcttgaagatatggacagggcagaagaccgggacaagtttgaacaaacacttgtagaactagggattccgcagccgcttggcaaaacagctacatccgttgacggagctgtcgctattgcccgtaaaatcggctatcctgttttagtgcgcccttcgtatgtccttggcggccgggcaatggaaattgtctaccatgaggaagagttgctgcgctatatgcagacggcagttaaagtgaatccgaagcaccctgtgcttgtcgaccgctatttgacaggaaaagaactagaagtcgatgcgattagtgacggcaacgacgtttacattcctgggattatggaacatattgaacgggcaggcgtccattctggcgattcgattgctgtttatccgccgcaaaccgtgccagaccatttgaagcaacgcttaattgagcggacaacgagcatagctaaagggttaaacattgtcggtcttttgaacatccaatttgtttggcataaagatgacgtctatgtccttgaggtaaacccgcgctcaagccggaccgtgccatttttaagcaaaattacgggcgtgccaatggctaaagttgccacgcatgtcatgctcggcaaaacactgcgccagctcggctaccaatcaggctaccacccagagacggaggaagtgtctgtaaaagtgccagtgttctcctttgccaaattacgccgcgtcgatatttccctcggcccggaaatgaaatcaacaggtgaagtaatggggcgggatcaaacgttggaaaaagcgctctacaagggccttgttgcttcaggcatgaacatccctgcccacggtgcggtattgtttacaatcgctgataaagataaaaatgaatcagtcagcattgccaaacggttccatgaaattggctatagccttgtggccacatccgggacggcaaatgtactggcagaagcgggcatcccagtcaaagtcgttaacaaaattaatgaaggggaaccccatttgcttgatctaatccgccaaggcgaagtccagtttgtcattaatacattgaccagaggcaaacaaccagcgcgtgatggttttcggattcgccgtgagtccgtagaaaatggcgttgtctgcttaacgtccattgatacagcacaagcgctgctcagcgtgcttgagtcgattacatttgcaacttggagcatgccgcaacacgggtaattttttctgagccacttgcctaaagcttgtggctctgtatgtatgactagcgttgggaggcagcaggatgagaaaaaaacaagggcgattaacgatcgtcaaacaaactgaggttgctcgagacagctatgagcttgtgctggaaggcgaattggttaagcatatgagtcaacctggccagtttttgcatgtacgtgtggatgaatcagaagacttgctcttacgccggccgattagcattgccaatatcgatcctgaaaaagagcaagtgacgatgatttaccgcgctggtggggcaggcacaaaacgccttgctgcccaaagagtagggaccgaagtcgacgtgcttgggccacttgggcagggcttcccacttgaggaagcaaaacggggagaagaagtgttgttagttgggggcggcatcggcgttccacctctctattatttaggaagacgtctagtagaaaatggcgcccgtgttacttctgtgctcggattcgcctcgcaagcggatgttttttacgagcaaccgtttaagcagttgggcaatgtccatatcgcaacagcagatggcagttacggcgctcctggctttgtcactgacgtcattagccaacaaagcctcgattttgatgttctctattcatgcgggccaacgccgatgttaaaggcgttaacagcccgttaccgggaacggcgtgcgtttatttcccttgaagagcggatgggctgcggcgtgggcgcttgctttgcttgcgtttgccacgtagaaaatggccaggctcatgagtaccgcaaaatttgcacagacgggcccgtctttccagtaggggaggttgtgctgtaatggaacgtttgcaaataagcttgccaggcttagagatgaaaaatccggttatgccggcatcaggctgttttggtttcggaaaagaatacggccaattttttgatttaaatcagttaggggctattgcgataaaagcaacgacaaaagaggcacgctttggcaacgaaacgccgcgagtggcagaaacaaaagcgggaatgctcaatgccatcggcctgcaaaatccagggcttcaaggggtaatcgagcaagaattgccacggtttgacgattacgatgtgccgatactcgccaatattgccggctcaacgatggacgattacatcgaagtggctgcagagctgtcacaacaacggaacgtttcagcaattgagttgaatatctcttgcccaaacgtgaaacagggtggaattgcgtttggaacagtgcccgagatagcggcagagctgacaaaggaagtcaaggctgtgtcagccgtgcctgtctatgtcaaactttctcccaatgtagcggatattgtcgccatcgccaaagcgattgaaaaagcgggagctgatgggctggcgatgattaacacgttgctcggtatgcgaattgatgccaaaacgcgtcggcctgtgctggcgaaccaatatggcggattgtcgggagccgccattaaaccagtcgcacttcggatgatccaccaagttagccaacaagtcgacattcctattattggaatgggaggcattcagacagcggaagatgtgattgaatttttacttgctggagcaagctgcatcgctgtcggcacggctaattttacggatccatacacatgtccaaacatcattcgtgacctgccgcattggcttgacagattggaagtgcaatcaatcactgacttgattggagggagctggaacgaatgaataggccattttttatcgctttggattttgatgagcacgccaaacgccagcgcttcttggagtcgtttgctgccgaaacgcttgatgtaaaaatcggtatggaactgttttaccgggaagggttgtctgtagtccatgaattaaaggaagccggttatcggttgtttcttgatttaaaacttcatgatattcccaataccgttggaaggacgatgcgtgctttagccgaattggacgtcgatgtcgtcaatgtccatgctgcagggggaaaagcaatgatggaagcggctttagaagggctcgatgcagggacaagagcaggaaaacagcggccgaaactcatcgctgttacgcagctgacgagcacggacagccgtatgctcgctgaagagttgctgatcgataaggcgatggatgaagtcgtggtacggtatgcgcagcttgcccaggaaagtggattagacggtgttgtttgctcagcccatgaagtcccccttattcgggcagcatgcagcgatcggtttttgacggttacgcctggcattcgcaggcaagtcgaccaagttggcgaccaagtgcgtgtcgtcacaccaggggaagcaaaagcgctcggtagttgggcgattgtcgtcgggcgaagcattacagcagcagcagatccactagctgtttacagagaaatgaaccaagattggaaaggggcgaccgaacattgactagcagaaccattgcgaaccatttacttaatataaaagcggtgacactttcacctgcaaaaccgtatacgtggagctcgggattaaagtctccgatttattgcgataaccgtttaacattatcttatccacatatacgtaacgaaattgctgaggggctagttgctatgattagagaggctgcccctgacgctgacatcattgccgggacggcaacagctggcatcccacacgctgcttttgtggctgaaaaacttcaattgccaatgatttacgttcgttcgagcgctaaaggccatggaaaacaaaatgcgattgaaggacatttgccgtctggcagcaaagtagttgtaatcgaagacttaatctcgactggtggcagttccattgcagcagcggaggcattgcgcgcggctggggcagaggtactgctcgttgccgcgatcttttcgtatcaactctcgcaaagcgatgagaactttaatggcgctaagcttcctgtccgtgtgctaacgacttatgctacgcttgtcgaagaagcgcagaaacggggcgccattacgagcgaagaacaagccaaattggaagcttggcggaaaaaccctaaagatgaagcgtggatgaatctgtaaacttttcgtgaaggggctgtgttgatgagacgaatggaaggcgctgaattcgatcaacttgttgatttttttgatcaaatggcaacgacgaattggctttcgcagcttcacagtcacttaaagcaacagtcagggagttggcaaggaaaagccgttgccgacattggctgcgggacagggaggttgctgctccgaggctcaacggaagcgtctgaattaacaggcgtcgatttatcagcaggcatggtgacacgtgccaatgccctttttcaggagaaagggatcgcccataaagcaaaggctgtgcaaggggatgccgcatcgttgcctctcgcaagcggtgcctttgacatcgccttttcgacatgtgtgttgtttttgctgccagatttgcaccaaggtgtaaaagaaatggcccggattttaaaaccaggtggcatcgcaatcttgttaaaccctgctcctgcaatggcggtggagacggcgagagcctatgcacaaaaacagcaatttccgaaagaggaaacggactatttgcttaaatgggcgactgtctctgaacgccgccaccgaaaaagtacagcggagttaagcgacattctaaaaaactggggttttgccgacgtaagccacgagcttgtgcttgaaggcctggccttaatcagcaaagcggaaaagcaaccggcttctccttaacaacaaagacatctttccagaagcacaatgattttgtatgcttaatgggaatacaaggaaagaggtggcttgtgtggaagaagcgaacgagaaaaaggcagagcttgaagcgcgactagccagttgtgaaaaaacaattgctcatttagtcgatgaaaatgcaaaagccaatgccaaaatcgatgcgttatttggtgtcatccggagcattagttcaatgaccgaccgccattttgtcgaagatgcaaccgcgatattagaggcaaacggcgatttgtatagagccgatgcgtatgggctaagtttagaagaatataaaaaacaattcggcaagtagtgagcaacttttacttagcagctgtttttcgctgtcgttgccttaacggtttgggggatcaacggaaagggaaattcgatacccgcactcagactattctgagccagcttttctattaaagaaaggctggcttttttgtgtttgcaagcaacacggatacgaatggcaggtttggcgaagggcatgctaaacatacattatgacgcaatgggaataagttggggttaacatgagtaagaaacaattgctgttagtaggaggagcaagcatcgtcgttgctgtgctcgcccacgctctgtttttttatgaaacagcagctggccgatttatggtagggccaaatgacggacttgggcaaatcctgccttttaagcattttttataccaacagttaaaaaatggtcattggagttattcgatccagtttggtttaggcgcaggcacgttttcacaactcgcctattatttttcaacaagtatggtttattccttctcttgcctgcttgtttatgtcggggaaatgagcgggctgattgccaacgttgacttgttgttctggggaaaggcagctgtgtatatcaatgcagctaggttggcgctgattctctttctggcgacgagtgtattccactacatgaacatgtctgttccgtacgcctttttaggagccgttttttacggggtgagtgtcatgtacttcactcacgggatttactgggaattttttgctgatgcctttttgtggttgcctttgcttgtcctaggcgtcgaaaagctgatcagggaagaaaacccgttttggctgattgctgccatgagcctgtcacttatcaataacttttatttttcgtatgtacattttatctttttaagtgtatacgctttgctacgctggctgattcgctttcccgaagaccgcctgattataaacgttcaactgcgttattatgtggcgattgcagtgctcagttttttcataagcgcggtggcgtttattccagcggttagcggttttttaagcaactatcgcccgccgtttacagacaaagtcccactgttttctgtccatgataatcttctatacggaagcaaattttggctgttgcctcctttatttgtcttgtttgcttgtataaagcagctttatgtcgacaaaacggcacgcttgtttatcgtcattgccctattgttttgcttgttccattacagcccgtttgtggcgagcgtctttaatgggttttcggcgccacaatttcgctttgagtatatagggacatttgcggtagggggcgtgattgcccgtggcatgatgcacttgcaggcgctaacaaagcctgatcttgcccgtggtgtcgttgccatggtaatgatttatatgctcgcttttcttcttgacgatacgttgtcattgccttttttctctagccagtatgcagtcggcatcgccattttggctgtcgtaagtgggttagccgttttgtgcttgcgccagtcccgccagagggtggctttgctttgcgtcttgttcatcgtttgccaattgctgttcattaacgtcggagcgagcacgtttttttcgactacaagtacaaaacaagcatctgaacgctttatgagcagcgagtcatacgattcgcctcaacaaggggaactgatcgaacaagcgttaaaaaggaaaaaacacccattggcccgaatcgaatggatggtcgatttccgcaacaacactccgctcatacaaggtttttatggcaatagcgcctattcaagtgtgctgaacggaaacattctccagttttactacgatcatttgcaaattgacatgggaagagaaagtgtcagccggtattacggttttggtgatcgcgccaatctccatagccttatgaacgtgcaatttaagttagttgacaaaaaggaagagactgctattccttacggcttcactcttttctctgaaaatgatcgttatgcgttatatgaaaatcaatggctgctcccatttgccagggcaacgtcaaacgtcttccttgaggaagacttagaaaagtacagtccgcttgttcgcgaacatgcgatgttagaagggattgtgctcgcatctggaaaagcaaccgccaaagcggttccagagacagatgtattggaaagggcgcgaatcaacgcagtaggaggcacatacaagaacggcacactcactgttacggataaggtcggcggcattgatattgtatttgtgaaccgggctgccgaggaaatcgatgattatgtttcgttttatttgcaaaaccaatcgaaaacggcaccccgttttacattgcaagtcaacgattacaaagcgtggcgcaaatcacggagttcgatttacaaaacagatgccaatgatttgaccattcgcgttccttctcgtgaaatcgtgtcgttacgagtgccaaaaggcatatacacacttaaggacttatcgcttcaaagtgagacgtatcaacggctccaatatgtgtatgcccgtgaggcaaacaaacccattcacgtttcctttgaggggcaaacactgcgtctttcctacgacaataaaaaaggcgacactcatttaactgtcccaatcccttatgagaaaggatgggaagtgaatgtcaatgggaagaagcagcaagtcgaaaaggccaattatgctttcctcggcacggcgattgcagaagggaaaaatgagattgtcttttcttatttgccgccttattttcgcacatcgcttcttctaagtggatgtggattgttggcgacagcgacgtggatatatgtgcgctggcgaagtacctcataaaatcggctaactacactcctgtttgccgctctcgcctgcgaccgtacaggagtgtgttgtgcgatcatcgtacgttttctaatcgatacggagcgagcggacaacgtcttcttttggcgttacgaaaagcgtcgtctgcttgtcgtatgtgacatagccaggcttggcgccgcttggttttttcacatagcgtatttttgtataatcgaccggaacggaagcagagtcgcgcgctttcgagaaaaaggcggcgacaagcgctgcttctgttaacgtttcttcatctggcgaggctgagcggatgacgacgtgtgaacctgggatgtctttcgtgtggagccaaatgtcatcttgccgtgcgagacggtttgtcaaatagtcgttttggcggttgtttttccctactaaaaactcgatgcctgtagaagaacggtatgtttctaactgtggtttatccagttgttttttcttttttttgccttgttgccgctttttaatgtagccaccttcaatcagctcttcgcgaatttcctcgatgtcgcgtggagaggcagaagccatttgcgcgagcagcgaatcaagataggccagttcttgttctgttttctcttgttgattcatgacttcaatacgcgccgtcttcgctttctggtagcgtttaaaataggactgcgcattttccgctgggcttttctgcgggtcgagggcaatggtgatggtttgcccattttcgtcataatagtcaatgacgtctaccgatgaagcgccgcggtcaacagcatgaatgttggcagttagcaactctccttgtttttggtagctgtctgcttcatctgcttgttgaagcgtctgctctaacttttttaacttccgtttgtttttttggtattcgtttttgagcaagcgctccagatcgaacgcttgttgtttgacccggtcccgttctgctttgccatagtaatagcgatctaaaagagcacttggtgaggaaaacacgtggcgttccccgtttttatgactaagatgaatgactgaaaaatagtctttttcaccttgcacgagttctagcgtatactcgtggtttttcaacggtgccaacgtgctaacaaatgcagggggcaacgtttgccggttcgccaatttggcccgggcgacaatttcagctgcgatcaagggagaaagacccgcaaatgattggacaagttgtttgtccaatttccctccatgaaaatcaagcgcgaaaagaacatctttttctgtcgccgtaagaggatcgagtttattttgctctggtggccatttatatggctgtccagggccaacgagacggtaactgctttggtcaaagcggacgtgcttaatgctgtcgataatcgtgtttgttttttcgtcaactaaaataatgttgctatgtcgccccatgatttccacaatcaacgttttttctgttgtatcgccaagctcatctttattggcgacttttaagacaattatccggtcatagccatgttgggtaatcgacgtaatgatgccgccttccaagtgtttccgcaacagcatacaaaacatcggcggctcggcgggggtgtcgtatttttccgttgttaagtgcaggcgtgcaaacacagcgttggcagaggcgagaagggcacgggtcttcccttttgctcgaactgtaaatacaagttctgttttaaatggctggtggattttattaatccggccgccgactaattgctgcaattcatgtgtgattgctcttgtcatcatgccgtcaaaagacatgtatctcacctcttcattcctcatcttccgttgcgacgatgtttcacaatgagtatagcatttttttgcctgacactgaataagatggcttgtataccgaagcatgtacaagttaggggggcatcttgtgagtacaagtgaatgtggggtgaggcaatgaaatggtatagcatgaagccagaggaagtcgagtacaaaacaaatacagatatagcgaaaggattgacagataaaaatgtcaaaaagcgcctcagcacatatggcccgaacaaactaaaagaagcgccacggccatcagcgttggccacgtttctggcgcaatttaaagactttatggtgcttgttttgttggctgcgacgctcgtatctggtttgattggcgaagtgctcgatgcgattacaattatgtgcattgtgttgctaaatgggattctcggttttgtccaagagcgcaaagccgaaaaatcacttgatgccttaaaggagctgtcagcacctaaggtggatgtcctgcgcaatggcgaatgggggcacgttccttcagctgaagtcgtccctggtgatgtgatcaaaatagggcctggcgaccgagttggcgctgatatacgcttgatccacgtagccggcttgcgcattgatgaagcctcgctcacaggcgagtccgtccctgtccacaaacatggacaggaaatcgccaagctggatgtgccaatcggcgatcaggaaaacatggcatttatgggaacgatggtgacgcaaggaagcggagttggcattgttgtcggtacaggaatgaaaacggaaatggggaaaatcgcccatttattgcaagaagcgcaacctgtcatgacccctttgcaacggcggttggagcagcttggcaaaacgttgattgctgtcgccctattcttaacggcgcttatcgtcttgattggcttgcttcaaggtcatgatttgcatacgatgtttatttccggtgtttctcttgccgttgcagctatcccagaaggtttgccagcgattgtcactgttgcactcgctctaggtgtgcagcgaatgattaagcgcaaaggaattgtccgcaaactcccagcagtcgagacgctcggttgtgcaaccgtcatttgctctgataaaaccggcacccttacacaaaacaaaatgacggtcaagcagctatgggcgaacaatgaatggcttcatgtgagtggcacaggttatgaagcagagggcgaatttacgaaaaacgcagaagtagtggcgattgcaaaacgtccgactttttgccgattgcttagttatggcgtcttgtgtagcaacgctcaatttgttgaaaaacaagagggaaagaaaaaaagcaaaaccggcctttctcttgatggcgacccgacggaaggggctattatcattgctgctttaaaagcgggctttacgaaaggagggctagcagcaacctacaagcgagtcgaagaatttccattcgattcaacgaggaaaatgatgagtgtgatcgttaaagacgaaagcggcaaagcctatgtcgtcacaaaaggagcacctgatgtcgttcttgcccgctgcaacgcagttgccacggatgggcgcacagagacgttgacagcaaccaaacagactgaaattgagggcgttgtcgagcaaatggcatcaaaagcgctaaggacattggcgattgcttaccgtcctttgatgggaaaggagaatgtcaaagatggcgatgatgccgaaaggaatttaatattagtcggcatccaaggcatgattgatcctcctcgggcagaagcaaaagatgcgatccaagagtgccgagaagcgggaattaaaacggttatgattacaggcgaccatcaagtgacggctgccgcgattgcgaaagagttgcagattttgccaaagggcggaaaagtcatggacggaaaaacactttcccgtttatcggttgaagaactggaagaagtcgttgacgatgtgtatgtctatgcccgcgtttcccctgagcataaattaaaaattgtcaaagcactgcaaaagaatggcgatattgtcgccatgactggggatggtgttaacgatgcgccagcaattaagcaggcggacatcggcatcgctatgggagtgacaggcacagacgttgctaaagaagcttcgtcacttgtccttgctgatgacaacttccttacaataaaggaagcaataaaagaagggcgcaacatttacgaaaacattcgcaagtttatccgctatatgctggcttcgaacgttggcgaaattttggtgatgttatttgccattctgctcggcatgcctctgccgcttgtcgccattcaaattttatggatcaacctagtgacagacgggcttcctgctgttgctcttggaatggaccaagcggaaggggatgtaatgaagcggaagccgcgcaaacaagacgaaggtgtctttgcccggggacttggctggaagatcattagccgtggttttatgatcggcgcggtaacgattgctgccttctcactcacctatgaaaatgatccggcacagcttacgcttgcgcaaaccgttgcctttttaacgcttgtcatggcccagttaatccatgtgtttgactgcagaagcgaatattcgatttaccaccgtcatttgtttgaaaacaaatacttagttggcgctgtttttatttcgatcttgttaatggtagccgttatttatgtgcctcagttgcagcctgtcttccatacagttgcgttagggtttagagaatggctgcttgttattggcatggcggcaattccaacggtcgtccttggcggtttccagctatttaaaaaggaaccaaagaacaacgcgagagaaaataccccccttgccccttaagcaagggggcattttgttgatgtcttgtaaaaaatgaggtaaaatacaagattgaatacgtatctacttgggacttcataatcattcgtataactcctagaagatttggtataatggatgatagaatgcatggctgaccgaaaacgggggattatttcatgacgataaagcttattaacatcgggttcggcaatattgtttccgcaaaccggatcatttcaattgtcagcccggaatccgcgccaatcaaacgaattatgcaagaggcgcgtgaccgcaatatgttgattgatgcaacctacggtcggcgaacgagagctgttattgttacagacagcgaccatgtcatcttgagcgccgttcaaccagaaacggtcgcccaacggctacatacgaaagaggatggagtggaagacgcctaagcgaaaatggaggtagagtcagtttgatgaaaagagaaaaagggctgcttatcgtattatcagggccagcaggcgtcggcaaaggcacggtttgcggggcattgcggaaccagaatacagcgattgagtattctgtttcggcgacgacgcggaaaccacgcgaaggcgaaaagcatggtgtcaactatttttttaaaacgcgagaacaatttgagcaaatgatcgaggatggaaaattactagaatgggccgagtatgtcggcaattattatggcacgcccattgactatgtccaggagacgatcaatgctgggaaagacattattttagaaattgaagtgcaaggagcgcaaaaagtccgaaccgtatttccagaaggggtatttatttttttagcgcctccaagcttaaaagaattgcgtgaccggattgtcggacgcggcacggaaacagaagacattattaatgaacggatgaccgtagcaaaagaagaaattgatttaatgaccatgtatgattacgtcgtcgaaaacgataaagtcgaatgggccgttgagcggattaaagcgattgtaacagctgaacattgcaaacgggaacgcctaataaaaaaatacaaagaacttgtggaggtcgaaaaataatgctgtacccttcaattgacaatttgctagaaaaattggattcaaaatactcgcttgttacagtctctgcacgccgtgctcgtgaaatgaaagaagactctgcccgggtgccacttgtggaaaagccgaagtcatataagtttgtcggcattgcccttgaggaaattgtgaacgaccagctgacaaagcgtgtgccaaaagaggagcagtgaaaaaagcgaataaaaacgaaagctgtcttcgtacacatttggtttgccataacggcacctttgcccaaagaagacagcttttttgcatctttgcctaaatggaggaaagcacgatgttaaaaaacaagacgattgtagtaggtgtgagcggaggcatcgccgctttcaagacagcagcgcttgtcagcaagttaacacaggcgggagcgaacgtttatgtggtcatgacagaagcagccacgaagtttgtaacgcctttgacgtttcaagcactatctcgcaatcctgtttatacagatacatttacagaaccagacgcaacaaaaattgcccatattgacattgctgaccaggcagatcttgttttgattgctcctgcaagcgccaatacaattgcgaaattagcggcaggcattgctgacaacatgctgacaacgcttgtgttggcaacgaaagcgccagtggcattagcgccagcaatgaacgtcaacatgtacgaacacccgtctgtacaggaaaacatggaaaaactgcggtcttatcattatcaattaattgagcctggtgctggttatctcgcgtgcgggtgggtcggcaaaggccgtatggccgagccagagcaactgctcgaactggtcgatacgcttttggaagaggcgacagatttgcgtggcaaacaggtaatcgtaacggcaggaccaacaagggaacctcttgacccagttcgttttttcagcaattactcttctggaaaaatggggtatgcgctcgcacaagaagcgcggcgacgcggcgctcatgtcacgttaataacaggtccgacggcgcttgaagcccctgttggcgttaaaacggtcgccgtacaaactgctgaggagatgtacaatgcggtaaataagcgctatcaacaagcggacatcgtcataaaagcagcagcagttgccgattaccaacctgttgacgtttttgcccataaacagaaaaagaacgcagacgaatggtcggttgcactagagcggacaaaagacatcttgcgttttcttggcgaacataaaaaggaacaaattcttgtcggctttgcggccgagtctgagcaactgcacacatacgccaaaagcaagcttgagagaaaaaaccttgacttaatcgtcgcgaacaacattactactgaaggcgctggctttgatgttgatacaaatgtggtcactgtatttactagagatggacaggaaacggcttatccgcaagcctcaaaaaaagaggtagccaagcaaatcctcaatgaactagaagcttatatgaaaaggcgtgaagcgtaaagtgattgcccgtgtcattgttgatgtgccaacagcacagacggacaggctatttgattacgaagtgccgcacgaatggcgagcgtttgcgcgcccaggtgcccgtgtgatcgtcccttttgggcctaggcgcatacaaggctttgtcgtcgctcttgaacaaacgagcgaagcaacgaaactaaagccaatcagtgaagtgcttgatccattgccagtgcttagcgaagaattgttagaacttggggactggttggcaaaaacaaccgtttgttacaaagtcaaagcgttttttgcgatgctgccagccgctttaaaaacaaaagtcagcaaacaagtagagcgtaaagcggcactggatttgttgccattgccgctgcaaacgttgttcgcggaccacgatgtcgtaccatgggaagaagcccgtagtcttatgaaacaagatttgtcgcttctcaaaacagcgcttgacgaaggggctgtctcgctcgtttataaagtgactgaaaaaggcgccaaaaagacagcgaaactggtacaagctttgccgaaacaagtagaggacattcccgaacgtgccaaaaagcagcgggaacttttttgctatttgcaggaaaatggcccactcctaaccaaggacgcgctacaacagagcaaaacgactagagcaacattaaaagcgttaattgaaaaagggtttgcggaagagacggacgtagaagtttaccgtgatccgttgcaacatgagcaaatccctcctagcgcccctctggaattaacaccagcgcaggcagcggtgattgcccccattgaagcagcgattgaaaacggccaccatgaagcgatgctccttcatggcgtaacagggagtgggaaaacggaaatttacttgcaagccatcgcaaaagtgttggaaaaaggcaaagaagcgatgatgcttgtgccggaaatttcattaacaccgcaaatggtcacacgttttaaggcaaggttcggtgacttggtggcgattatgcattctggtttatcgaatggcgaaaaatatgatgaatggcggaaaatccaccgcaaagaagtcaaagttgtggttggagcgcgctcggctgtgtttgctccgtttacaaacattggtctcatcatcattgacgaagaacacgaaacaagctacaaacaagaagaaacgccgcgctaccatgcgaaggatgtggccctttaccggggacggaagcacgaggctcccgttcttttaggcagcgccacgccttcagttgaatcgtttgcgcgtgcaaaaaagggcgtctaccgccttttgtctttgagggaacgcattaaaggccgccccctcccagaggtcgacgttgtcgatatgcgtgaagaactgcgacgtggcaaccgttcgatgttttccgggcaattgctgcaagcattgcaagcacgccttgaacgcaacgaacaaagtgtgctgtttttaaacaggcgcggctactcgacgtttgttatgtgtcgggattgtggttatgtggccagctgtagccattgtgacatttcctatacataccaccgggctggcaattcgctcaaatgccattactgcggcgatgaacagccaatgccaaagacgtgcgcagaatgcggaagcgatcatattcgtttttttggctctggtacgcaaaaagtcgaagaagagttagcgcgccttttgcctgaagcaaaagtaatccgcatggacgtcgatacaacgagaaaaaaaggggcgcataaacaacttttggaagcattcgggaaaggcgatgctgacatcttattaggaacacaaatgattgccaaagggctcgactttccgcggattacccttgttggcgtattaacagcggacacgatgctgcatattcctgatttccgcagtgctgagcggacattccaactgttggaacaagtggcagggagggcagggcgtgaccagcttaaaggcgaggtcattatccagtcgtatacacctgatcactatagcatccagctcgtaaaaagccatgactatgaacagtttttcgctaaggaaatgcaactgcgcaaacagggcagttatccgccttattactatatggcactcttaaccatttccgatacagagctagcgagcacgatatcagcggcacaaaaagttgcccgttacttaaaagaaagcttaaacgaagaaaccgttgtcctcggaccagttgtctcgccaattgccaggatcaaagatagatatcgctaccaatgcgtgataaaatacaggcatgaaccaaagcttcaagaaatacttgataccgtcatgcgccattatttgcgcgatgcaacgaacaaaaaactgcaaattagcatagatgtaaatccgcatttctttatgtaagtaaggagtggaagtgttgaaaattgtgtttatgggaacgccggcattttcagtgccgattttaaaacggctgatcgatactcatacggtattggcagtcgtcacacagcctgaccgccccgttgggcgcaaacgcctgctaacgccaagcccagtaaaagaagaagcgcaaaaacatggaattcccgtattgcaaccggaaaaaattcgtaagcagtatgaagacattcttgcgtttgcgccggagttaatcgtaaccgctgcttacgggcagattgtcccaaaagctgtccttgatgctcctccatacgggtgcatcaatgtccatgcctcactgttgccaaaataccgcggaggggccccgattcatcaagcgattatcgacggcgagaaacaaacaggcatttcgattatgtatatgacagaaaagcttgatgctggagctgttctttcccagcaggcggtagcgataacagatgaagacgacgtgcagacgatgcatgacaagctaagcgcgattggcgctgacttgcttgaaaaaacgattgttgctttagaacagggtacaattgaggcagttgcgcaagatgaggacaaggcaacgtttgctcctaatatcaaacgggagcaagaagtactcgattggcataagccggcaagggcgctattcaaccaagtgcgcggcatgcgcccgtggccagttgcctacacgcttataaatggcaaccgtttgaaagtgtgggaggcaaacgaaatagcaggggagcatgaccgtgagcctggtgaaatcctagccgcgacaaaacaaggaattgacgttgcttgtgggaatgggacgattttgcgattgacagttgtccagccagcaggaaaaaaagcggtgctagcaaaccaactgctgcaaggagcccatccgttccaagtaggaaagcgtctcggtgaagggcatgaataggccgagcgttcgcgaagtggcgcttgatgcgctgctcaaggtcgagaaaaaccaagcgtatagccatctgttgcttcattcgactttaacaaacgccggattggacaagcgcgacagcggactgctaacggaactcgtttacggtacgattgccaggaagcgaacgcttgattactatttggcgccttttataaaatcgggtaaaaaacgtgctttatgggtagatgtactcttgcgcctttctgtctatcaaatggtatatttggaccgcattcctgaccgagcagttgtccatgaggcggttacgattgccaacaaacgaggccataaaggcattagcggccttgtcaatggtgtcctccgctccatccaacggcaaggattgccggacgtgggtgcgattgctgatccaatcgagcgagccgccgtgcaaacgagccatccgcaatggctaatggctcgctggatgaaccaatacggcgaaaacgatgcgattgcaatggcaaatgccaataacattccccctgaagtgtgtttgcgcgtcaataggatgaagacaacagcagcagaactagtggcgcatttagggcatgaaggggttgaggcagaaacgagcaagctgctacctgatttggctgtcataataaaaaaaggcaatccatttgtagggaaagcctacaaagaaggacttttcaccgctcaagacgaagcgtctatgcttgtagctaagcttcttggtccagaagaaggaatggatgtccttgatgcttgtgcggcgcctggagggaaaaccacccatattgccgaacaaatgagcgggacgggtcatattttagctctagacctccaccctcataaagtgaagctcattgccgagcaagcagcgaggctcggtcttgagaacattgaaacacgtgcagaagatgcgaggacgcttcaaacaaaaaaacactatgaccgcgtccttgtcgatgcgccttgtacgggatttggcgttattcgacgcaagcctgacattcgttggtcgaagacagaaaaggacgttaaacacattgccaatgtccaagcagcgattctcgcccatgcaagccagtttgtcaaacagggcggcacgcttgtctatagcacgtgtaccattgaaaaggaagagaacgaacatgcgatagaacgctttttagacactcatccacagttcgaaacgaatgaacgattttatagaaggctgcctgatcacattcaagcaaacgggcgttttagtccgcttggcttaacgattttgccccatgattttggcacagacgggttctttatggttgctttaacacggaagtcttaatgagcctgggcgcaaagaagagactgctaaatgaggtgacgtttttgattgaaagcacagcatttttaacagatgtaggcaaagtgcggtcccataatgaagacaatggcggcatttttgtatcggcagcaggtacgcttgcaatcgtcgctgacggcatgggcggccattctgccggcgatgttgctagccgcctggcgacagaagtaatggaggccgagtggcgcaaggtaaaagagcctctgtcagcgtcatctgcagaacaatttttaaaggaggcgtttgaacacgccaatgcctcgattttggcccatgccaaagagaatcctgattgcgaagggatgggcacaactgctattgctgctgtctgtacagaagaatacacgacgattgcccatgtcggtgatagtcgcgcctatatttataatggaaagcagttggtccagcaaaccgatgaccattctcttgttgcagagttggtccgcagtggccaaatttctgcagaagaagctgaccaccatccccggaaaaacatcgtgctacgggcactcggtacagaagcgcaagtgaaagtcgattcttttacgattccttctgagtttatcgatacgctaatgatctgttcggatggtctgtccaacaagcttgccattaaagagttgcaagtcgaggtcgagcgcaaagaggagctgtctgtcatcgccaagtctctgattgctcgagcaaatgaacgtggcggagaggataatatatcgatcgctcttgtccgttttagcaaggagataggtgaataatatgataggcgaacgaattggcgggcgttacgtcgttttggacagcattggcggcggcggaatggccaatgtttatttagcgctggatgtgattcttgatcggcacgtggcagtaaaagtgctccagccacaattctcggaagacgaacaatttattaaccgttttagacgtgaagcccaggcagcgacaagtctagccaacccgaatatcgtaaacatttacgatgttggcgaggaagacaacgtctactacattgtgatggaatatgtgcgaggacgcacactaaagcaagtgattcaagaagaagggcctttagacattgctgttgcccttgattactttaagcaaattttatacggtgtcggccatgcccacgccatgcaaatcgtccatcgggacattaagccgcaaaacatcttaattagcgaaaatggcgaagcgaaggtaaccgatttcggaattgcgagggcgatgacgtcggcaacgattacccataccaattctgttatgggctctgtccattacttatcgccggagcaagcacgtggcggccatgtcacttatcgatctgacatatattcactgggcattgtcttatatgaaatggtgaccgggcagattccgttttctggcgatacggctgtttcgatcgcaatcaagcatttacaaaacgacataccctctgtacgtgaattggtgccaagcgtccctataagtgttgaaaatgttattaggaaagcgactcaaaaagacccgctgcaacgctatgaatctgcagaggaaatggtctgggcttgcgatgctgcactatcagcggatgctgaggaagatgtcgcttttgtcgaagacacggttagtgacgaaacgacaaaggaattgccgattattggcgtttatgccgataaacaattagaagataccattgccgtgccaagcaaacctagtaatcatcaagaagaggcagagggtgacaacgtgcctgaaccggaagcgaacaccacttctgatgatggcaacggagtgaaaaagaaaaagcggaaaaaatggctatggttgagcgcagttgcactagcagtgctcatcggggcgacggtcctcgcttttacgttttggaacgcgcttttcttcgttcctgagcaagaagtgcctgacgttgtcaatatgaccgaagcagaagcggttgaggaaattgaagcccgtaatctacgggtagaaacggaagaaatcgccgatgaaaactacgatgaagggcgcgtcgccagacaaaatccacaagcgggccgcgtcattaaagaaggccagccagttaaactgtttataagcgcctcgaaagatgaagtcaaaattgatgattaccaagggctaaccctttcgtcggcaacgaggcttcttgagcagaaaggattttctgtagagacacagccacgggaagacaacagcgagccggaaaacacagtattgtcccaaagcccgtcgccggacacaatggccgttcctgccgagacgacggtcgtgctcacatacagcgtgcctgaatcgattcagttggatgacttgacgaaccaaacagaagatgatgtacgcgcttattttaatagcgaagggttgcgcggctctttttcgagggaatacgacgacgaaatcgcggaagggcgggttattagccagtctccagaaccattgtcaacgctagagagaggggacaatgtgagcgtggtgctatcaagagggccagagccgcttcaagaacagcctggctcacctccagcggaagttcccgagcagcctacagatgaagccgaagaccctgtagaagaaacgccaactcaaggcgaagacaatgagggagacccgacgatggtttatcgcgtcacgcaaacgattgtcgtatcagaagaacagcaagcagatgggcaaagttttgacattcgcatcgttggcaaagatgccgattcacaaggtgatgaacgagtgcttgtggaagagacgattaccgagacgactgattttgaaatcgatttgcgtgtaagtcctagctatacaggctcttacgatgtatatataaatgatgaatttaaccggcagtcgcaaatctatacgtacaccgaggaagaggaataggcgcaacggcgacgtatgtgagcgtttatttacagtcggagggcgtggaaacgcgcccttctttcaataaacgagcagtcagactttaaagagaacgagtggtcgtgaaaatcaagcagaaaagagagggatggtatgccagaaggactgattgtcaaagcgctctctggcttttactatgtacaaagcgaaggggcgcttatccaatgccgaggcagaggtgtttttcggaagcgcaagcagacgccgcttgttggcgactatgtcgaatttgaggcggagaatgaaacggacggttatgtgatggcgattaaagaacggaaaaatcagctaaaccggccacctatcgccaatgttgaccaagcgattcttgtcttttcggcaaaggagcctgattttcatacgctcttgttggatcgctttttggtacatatcgaacaacatgacatcaagcctgtattaatcattagcaaaaccgatttgcttgaggcgagtgaacgggatgccctaacccggcaagtggcgatgtatgagcaaatcggttatcccgtcctatatacatcaacgaaacaggccgatgatcctagcgaattgctcccgttgttggcgaatcaagtgtcggtgattgctggccagtctggagtcgggaagtcttcgctattgaatgcgcttgccccagaggcgaaaattgaaacgaatgaaatatcaaggcaccttggacggggacgtcatacaacaaggcatactgaacttttgccaataggtgaaggccttgtcgctgatacgcctgggtttagctcgctggagtttacagacatggaggcggaagacctccgcttttgttttccagagtttttaagtttaatggatgactgtaaatttagaggctgccttcatgacaaggagcctaaatgtgccattaaggatgcagtagaaacgggggaggttgattctttccgctataaacactatttgcagtttttacatgaaattcaagatcaaaaaaggagatattaacatgatcagagtagcgccttcgattttagcgggtgatttttcaagaatgggagagacggtccaagcttgtgacaatgcaggcgccgactggattcatgtcgatgtgatggacgggcaatttgtgccgccaatcacatttggacaccaaatggtggaagcgatccgcccttataccgatcttccattagacgtccatttaatggtcgagcagcctgaaaaacaaattgcgttttttcagcaagccggcgccgattgcctcagtgttcatgttgaagctagcgctcatttgcaccggacggttgccgctataaaagaagcaggcatgaaagccgggattgttcttaatcctggcacccccgcttatgctgctgagcctgtgcttgcagacgtcgattatgtgctgcaaatgacggtcaatcccggttttggcggacaatcgtttatcccaggggcacttgctaatattaaaaagctccgcgctatgattgatgaacgccagctgccagtggacattcaagtagacggcggcatcaacccgacgacagcacaacaatgtgtccaagcaggggcgacgattcttgttgctgggtcggcagtgtttaaagaagccgatttagcaaaagcgattgcgcaaatccgtgggcagtgaatggagcgaattacccccttatgttaaaagccttgagaggactaggaaaacaggtctgatttttcctcttgctgcatagtctaataatagctacgggtggacacgtcaagaaggcgtttgacctcatgaaaggagagcggcaaatcgggctgctgactcattcaaatgacgggcaaatctcggtttggcgtgtgctcgcaaaatttattgttcaggcgtgcctgattgccagtgcttgaggaggaggagcaatgaaattttatacgatcaagctgccgaagtttttagggggatttgttcgagcaatgcttggctcatttaaaaaagaataagataaaaaaacaccgcggcaattgcggtgttttttttgcgtatttagacgcgttctacttttcctgatttaagggcgcgcgccgaaacatatacacgcttcggctttccgtctaccaagatacgaactttctgtacgtttgcaccaaagcgacgctttgatttattcattgcatgagagcgcttattcccagaacgcgctttacgaccagttatatagcattcacgagccatgtagtgccacctccttaacattctcaacaaaaacacgtagtcaacgttactcaaacatcttagcataggcctttccataacgcaataaaaaaagacaagtaaaaaggcttgacgcaaatcaaaagcttttaaaatagaaggcgatatagtaaaatggcgatacgtatggttactatttgaaggaggcagagcaatgacaattgaaatgaaaacggagcttggtacagtcgatgtgtcacaagatgtggttgcaacgattgccggaggcgcagcgattgattgctacggcattgtcggcatggcctcacaaaaacactttaaagacgggttagcggagctgttaggaaaagaaaacttccgtcgaggtgtgattacccgtgaagaaggggaagaacttcacattgatatgtacattatcgtaagttatggcacaaaaatttcggaagtcgcccatatggtccaaacaaaagtgaaatacgatttagagaaaatgcttgggcttgatgtggaatcggtgaacatttttgtgcaaggggttcgcgtcgcgaatccttaggatcgagaagggggaagacaaagtgagcaagaaattgaatggcgagacgcttgcccatatgtttatagagggggcaagcgagctagcgaataaagcggatgtggttgattcgcttaacgtgttcccggttccagacggggatacgggaacaaacatgaatttgacgatcacttctggcgtcaaagaaattcagaagtcgcagcaagaggacgtggctaaagttgctagcgcttttgcaaaagggcttttaatgggcgcacgagggaactcaggcgtcattttatcgcaattgttcagaggtttttccaaagcggtggaacgacatagcgaattgacgactgaacaatttgcaaaagcattgcaagcgggtgttgccactgcttacaaagcagtaatgaagccagtcgaagggacgattttgactgtagcaaaagacactgccaaagcagcagagcaggctgcgaaaaaagaaacagactttacgccatttttaacgacaatcatcaaagccgcggagcgctctcttgcaagcacgccggacttgcttcctgtcttaaaagaagtcggtgttgttgattcaggcgggcaagggcttgtctatatttatgctggctttctacaagcgcttacaggtgagcggagaccgagcttgttggcagagccaaatataggcgatttgattaatgcagagcacttccatgcgcaaaatgcccagtctcatatggaaacgggcgatattgaattcggctattgcacggagttgatggtgcgttttgaccgtgaaaaactggaaaagcagccatttcatgaagaagcttttcgggaaaaattaagcgagtacggcgattcccttcttgttgtatcagatgacgatttattaaaagtgcacatccatgcggaatatccaggcgaagtgttgacagaggcgcaagcgtatgggccgctcatgcaagtgaaaattgaaaatatgcgcgagcagcacgcacgccttacaaatgatagccacggtgggcatgccccagcatcggcacggccgaaagcagagtttgcgattgtgacggtcgcgatgggttcaggaatcgagaaattgtttaagggccttggcgctgaccaagtcattgctggcgggcagacaatgaacccaagcacagaagatattgtccaagctattcaaaaagccaatgccaaacaagtgattatcttgccaaacaacggcaatattgtcatggctgccaaacaggctgcagaggtaagcgaagcggacgttgaagttgtggcgacgaagacggttccccaaggtttagcagcgttgctcgcatttaatccatcaaacagtttgcaaaagaacgccgccgcaatggccgaagcgatgaaggaagtaaaaacgggtgagctaacgtatgcagtcagggatacgcaaatggataatcagacgataaacaagggcgattttatggggatagccgacaaaaaaatcattgcttgtggccctcgtaaacaagacgtggcgaaaaagctccttgatgaaatgattgatgaggaagcagaagtgttgaccattataacgggcgaagacgctacagcagacgatacaagtcaaattgaagcttacgtcaatgagcgccatgccgacatggaagtcgatattgttgagggcggacagccgttgtactcgtacattttttcagtcgaatgatccatctgcatacaggacgagaccacggatggaagcgcataaagagcatagacgataacggggaggggatcgtttggaaaaggtgaaaattgtcacagacagcacggcagacattcctaaggaagtagcagaagcacatggaattaccgttattccgctcaacgttcattttggcaatgagcaattcgaggatggggtcacgttgacaccgcctgcattctatgaaaaattgcagcaagcgagtgaaatgccgaaaacgtcgcagccatcgccaaaccaatttgaagaattataccgtagcctggcaaacgatggcgcaaaggaaattatgtcgattcatctttctgcaaaaatgagcggtactttgcaagcggctctaattgcgaaagagtccctcaagggagaactggatgttcatgtatatgattccaagcgcgcttcgtatgcgatcgggattattgtcgttgaagtggcaaaactggcggcaaaaggggctacactggcagaatgccaaaagcgctttgaagagctgcttgagctaacgactgtctatttcttggtggacacactcgaattcttggaaaagaatggccggatcggcaaggcgtctgctcttattggcacgttgttaaaaatgaaaccacttctttccttgtcagaggacggcgaagtgtatgccaaagaaaaagtaagagggcagaaaaaagcaatcgccaagatgcttgctttactagaagaagcatatggaaacaagaacgtccatgtcggcatttcccatgctgtcaatgagacgcttgcaaatgagctggccaatgaagtgaaagctcgttttcaagtacagtcgctgacagttacagaaattggcgcagtcattggcgctcatgttggccctgggacggtttcgctgtcaatgacagaagcggagcaaaagtaaaaatcgaaggctgcccattccccataagaagatggcagtcttctttttccttaaaaatggagggatggtaatgaaatatcggactgtttttgatattatcggccctgtcatgattggcccctcgagttctcacacagctggagcggcacggattggcaaagtggcgcgtgccctttttgctgaagtccctgaacgggcagatgtacatttctacggctcttttgcgaaaacgtaccgtgggcacggaacggatgtcgctgttgtaggtggattgcttgattatgaaacgaacgacgagcgcatccgtgatgctttccaccatgcaaaagaagcagcaatggacgttcatctccatgaggaagaagccgtcgtccaccaccctaacacatgccggatcaagctgacaaaaggcgataaacgcttagatcttgtcggcgtttcgattggcggaggcaaaatcgaaatagtcgagttgaacggtttcgacctccgtttatcggggaaccatccggctatattggttgcccatcttgaccgttatggcgtgattgccgcagtaagcaacctccttgcaaagcatcaattgaatatcgggcatatggaagtgtcgcgtaaagaaaaaggggaaaccgcgttaatggttatagaagtcgaccaaaatgtcgataaagcgctgcttttggaactagagaggctccctcacattacccatgtctcgaaaatccacgattaaagggaggggatccgtttgtttaaaaatgtcgaagaattagttacgaaagcggaacaggccaatatgccgatttcagaagtgatgatcacccaagaaatcgaagtgaccggtagagagcggcgccaaattattgaacagatgcgcgggcaattgctagtcatggagcaagcagtagaacgagggatccatgaagacgtcgtatccgtttctgggctgactggcggtgacggcaagaagctggctgcttatgtgaaaaacgggacaatgattggcggggggacgacccttttggctgtagcgggggcgatggcaaccaatgaagtgaacgcagcaatggggacaatttgcgcgacgccaacagcaggttctgctggcgttgttcctggtgtgctgtttggtgttgctcacaaactgaagcctacggaagaacaaaaactcaactttttatttacgagcggcgcgtttggttttgtcgtcgcaaacaatgcttctatttccggggctgctggcgggtgccaggccgaagtaggctcagcaacgggcatggcggcggcagcgctagtcgaactggcaggtgggacccctcggcaaagcgcccatgcaatggcaattgctttaaaaaatatgctcggcttggtgtgtgatccagttgccggcttagtcgaggtgccctgtgtgaagcggaatgcggcaggcgcatcccttgcaatcacggcggcggatatggctttagctggtatcgagagccgcatcccttgcgatgaagtcattgatgcgatgtataaaattggtcaaacaatgccagaagcactgcgggagacaggagaaggcggacttgcggcaacgccaactggccgcaagcttgaagcggagatttttggtaggagaacgaaacaaacgaaatgagcattggcacccttgatgtaacagccataaaaggcgttggcgaagaaagcggaaaattgctcaataaaatgggcattttgacagttggcgatttgcttgagtattttccgttccgttacgaggattatgcgctcaaacggcctacagaagcagcccatgatgagcgtgtgacaatggcgggtaaaatccaaaatgaagcgagcgtgcgctactacggcaaaaataaaaacaggctgacgtttcgaatcgaagtggatggtgtgttggtgacagccactttctttaaccgtgcgtttttaaagagcaagcttcagcctggaatggacgtgactgtcaccggaaaatgggacgcccatcggctgaccattacagggtctgaattaaaatttggcatcgttgaacgagaaggcaacctcgaacccgtttatcacagttcaggcaaagtgacaagcaaggcattgcaaaaatggattgctgccgccttctcggcgtacggtagccaaattgaagatccgttgcctgaaagcattcgtaaacgctataagttgatgggcaaaggcgaagcgctgcgccatcttcactatcccttcaatcgagaagcaacgaagcaggcaagacgacgttatgtgtatgaagagctgctattgtttcaattgaaaatgcgcgcgtttaaagaagcgattcgcaaccagcaaggcgggaggcagcttgacgtaaaagaggatgatattgccgcatttacttctttattgccgttcccccttacaggcgctcaacagcgcgcgattgctgatattgtgtcagacatccgctctccgttaaggatgaaccgtctcttgcaaggagatgttggctcaggaaaaacagctgttgcggcggcgtgtatggccggagttgtcggagctggcggtcaatgtgcattaatggcgccgactgaaattcttgctgaacagcatgccacaacgattgaagcgtggtttgagccactcggcctgaaaacggcgttgctcgttggcagtgtcaaaggcaaaaaacgccgtgaactgcttgatcaaatcgccaaaggagaagtggatattgtcatcggcacacatgccctcattcaagaagatgttgtcttttctacactctccctcgttattaccgatgaacagcaccgttttggcgtagaacagcgccgcatccttcgcgataagggcgaacatccagatgtattgtttatgacggccacgcctatcccgcgaacgctggcgatatcggtttttggcgatatggatgtatcggtgcttgatgaaatgcctgctggcagaaagccaattgaaacgtattgggtccagcacgagatgttggagcgtgtgcttgaatttgtgcgcaaagaagtcaagaaaggccgccaagcatatgtgatttgccctctgattgaagaatctgaaaagctggatgtgcaaaacgcaattgactttcatagcatgctaactgcccatttccaaggagacgcccaagttggattaatgcacggccgtttacaagcagccgaaaaagaggcagttatggctgcttttgctcgcaatgaattgcatattttagtttcaacaacggtcgtcgaagtaggcgtcaatgtgccgaatgcaaccgttatggtcatttacgatgccgaccgatttggccttgcccaactccatcaattacgaggccgcgtagggcgaggcgatgaaaaatcgtattgtattttagttgctcaaccgaagacagaagtcggcaaagaacgaatgcggattatgacagagacaagcgatggtttcgttttgtcagagcgagacctagaattgcggggtccaggtgatttttttggttcgaaacagagcgggcttcccgattttaaacttgctgatgtcgtccacgattaccgaacattggaagcagcacgccaagatgctgaccgtatttttaaagcgaatgtcctgaaaacagatccagagtacaggttgctctatgattacttgaaaaaaacaggcgccttcgaagaagtcaagctcgattaaaaggttgaatcctacgctgaagatctatatactagtcttagtacctagtcttaattctgaaatggaaatgtggaatacaggcggtgtggagatgaagataaaaaagaaagaacggcaacggctgttaatggagctgcttgaagggaacccttttatgaccgacgaagagttgtcggcccactttggtgtcagcatccaaacaattcgtcttgaccgaatggaacaaaacattccagaactacgggaacgcattaaagacgttgcctacaaacaacgagactcggttattgctttagcgcctgaagaagtctttggcgaaattgtcgatcttgttcttgaagagcgtgccatttccatctttgatgttgggccggagcacgtgtttgaaagaagcggcatcgccagaggccaccatttgtttgcacaggcaaattccttggctgtagcactcgtgaacaatgaattcgtccttaccgccaaagcgtctattcagtttactagacccgtccgtgcaggcgaacgtgtcgttgcgaaagcagaaatggctggaaaagggagcgggcgtacacggattctagtgacaagccatgtaaaccaggaagtcgtgtttactggtgaattcgcgatgtatcagcaaaacgaaacggaagagaggccacagcaatgagaatagctttggatgccatggggggagacaatgcgcctaaagcacacgtcgaagcggcgattcgggcggttcagacatttccagagcttgaggtcacccttatcggcaatgaagaacaaatcagaccacatcttaccaacacgacacgcctaactgtcatacatacgactgaaaaaatcgaggacacggacaaaccgacaacagctgtccgccgaaaaaaagaggcatcaatggtgctttgtgtaaaagaagtaaaagaaggcaacgctgatgcatgtatttcttctggaaacacaggtgcgctcatgacagccggtctcctttatgtcgggcgcattaaaggcgtcgagcgcccagggttggcgccaacgctgccaacgatagacggcaatggctttttgctcctcgatgctggtgccaatatggacgccagtcctgaacacttactccaatacgcaatcatcggcgatgcgtatcgacgcaacgtctatcaacaaaaaaatccacgcattggcctcctgaacgtcggcgcagaggctggaaaaggcacggagctgacgaaacaggcgtatcagcttcttgaaaacagctcccttcattttatcggcaatgtcgaagcaagggatttgtttgcaggcgtctgcgatattgtcgtttgcgacggcttttcgggaaatgtcgtgttaaaaagcgtggaagggacagcgaaaatggttttctcactgctcaaagagcaattgacaagctcattgcccgctaagcttgcagcgggtatgctcaagccccaattccgcaatctcaaagagaaaatggattactcggaatacggtggtgctgggttatttggcctaaaagcgcctgtaataaaagcccatggctcatcagatgcgaatgcggtttttcatgcgatacgccaggcgaaagaaatggtcgacaatgaggtgacaaagacgatcacacaaaaattagaaaatgggggagagtaaagtggggaaaattgcctttttatttcctggacaaggctcacaaaaagttggcatgggagcaacgctttttgctgaagattcattggcaaaggaagtgcttgaacgggctgacaaagcgcttggttttcctctttcagagatcatcgagcatggaccagaagaaaagctgaaacaaacggcttatgcccaacctgctttagtcacgatcagcactgcagtcctccaattgttccgcgacgctggcattcaagcagattttgttgcaggccatagcctaggggagtattctgctttagtggcatgtaagtcccttacatttgaagatgcggtcacacttgttcatcaacgggggacactcatggaggaagctgtgccacaaggacaaggggcgatggcagcggtactcgggttaaataaagaggagcttgaagaagtggcttccgaaattgcagcggacggcgaagttgccgaacttgccaatttgaattgcccagggcaaattgtcctgtcagggactgcgaaagggattgaacaagcagcggtgttagcaaaacaaaaaggggccaagcgtgtcttgcctcttgccgtcagcgggccattccattcgtcattgatgaagcctgcggccgatcaatttaaacaagcattagagcaagcgccatttgccaatccgactgttccactgatcgcgaacgtgaccgctgaagtgacagatgcccctgaagtcattcgcgaacagcttgctgaacaaatttattcaccagtacgttttgaagagagcgttcgccgcatgattgaactcggtgtcgacacatttatagaaattggcgcaggcaatgtattgtgcggattggttcgtaaaattgaccgcaacttgcggacatttgccgtcagcgaccgtgagtcatttgaaaagatggcggctgcgctgaaaggagacaagcattcatgttaacaggacaaacggctgttgtaacaggcgcttcacgtggaattggcaaagcgatcgcccttgaacttgctgccaaaggggcgaatatcgtcgtcaattatgcaggaaatcgagaccgtgctgaagaagtagtggccaacattaaagcgcttggccaagaggcgtttgcgtatcaggcagacgttgcctccgaaggggaagtggcagcgatgatgaaagaagcgatcggccgctttcaatcaattgatattttagtaaacaatgcaggcattacgcgcgataacttgctaatgagaatgaaagaagacgattgggatgccgtcatcaatacgaacttaaaaggggtgttccactgcgcgaaagcagtcagccggcaaatgatgaaacaacgtgctggcagaattatcaatgtttcgtctgtcgttggcgtaatgggtaacgctgggcaagccaattatgttgccgccaaagcaggcgtcattggcttgactaagtctttggcgcgggaattggcagggcgaggcattcttgtcaatgcggtggcgccaggctttattacgacagatatgacagatgagctagcaagcgaaacaaaggaacagctgcttcaacaaatcccattggcgaagcttggcgaaccagaggatatcgcccgtgttgttcggtttttggcaagcgatgacgccgcttacttaaccggtcaaacgatccacgttgacggcggcatggtgatgccttaataagagtcagcttgacaggcttacactctgtcggtacaattcttgtgctgatacttttgggaggaggtgaacgttttggcagatgttatggagcgtgttacaaaaatcatcgttgaccgtctaggtgtcgaagaatcagaagtaaaactagagtcttcttttaaagaagatttaaaagctgattctcttgatgtcgttgagcttgttatggagcttgaagatgagtttgacatggagattgctgatgaagacgcagaaaaaattgcaacggttaaagatgttgtcgattacataaataacaaccaataaccgcgagaaaagggccccttgcaaaagggggctcttttcacatcttcacacaaaaggaagctccacaaggccgcgggattctgttacaatcaacaatgagcactatgaatacgtatgttgcaaaatgagtagctccattgtttggagggaattatggcacaatcatcgaagtaccaacgcaagcctcggtcaggcgagcgaaaacggagtcagcggcggttagagctgacggaagaacaaaaaaagcagtttgacgacctccttgtccgcacgggtctaacgtttgaaaaccgcaaactgttgattcaagcatttacccattcctcgtatgtgaatgaacaacgaattttttcatcatcggataatgaacgtttggaatttcttggcgatgctgttttagaattggcggtttcccaatatttatttaaaacgtacaaaaatatgagcgaaggcgatatgacgaaattgcgtgcttcgatcgtatgcgaaccatccttagcccgttttgccgaagagttgcagttcggcaaacttgttcttcttggcaagggggaggaagtgacagggggacgaacacgccctgcgctccttgcagatgtgtttgaggcgtttattggtgccctttatatggatcaagggcttgagcctgtgtttatgtttttggcgcgttttatgtatccgaaaatcaaagaaggcgcattcacatacaagatggattttaaaagtcaactgcaagaatttgtgcaacgggataaccgcggccaaattcgctatttaatagtccaagaaagagggcctgcccacgatcgtgaatttgtctcagatgtgcagctcaatgaagaaacaattggcacagggacagggcgctccaaaaaagaagctgagcagctagctgcgaaacaagcgctgcttgcgctcaaccaaaaagaaagctagaaaaaaggaagcggatcatgcctccttttttctagctttttctacctcgaagctggccaagttcctggacaatttcgtccatctcgctaatcgagaaggacgggctccgcatcacatgggcgtgcaacgcaattaagtcgtcatgtttagcggggctaacactgtcgcttgtaataacgctggcattaacaacattcaatttctttttcatgtcatcaagcatcgtttcaatttcttcaagtgttaatgaagccaagtgaatcctccttttgcaatgcttactgatctctaccttaccaaatcaaaggggaaacaggcaattcatatttccagctgtttttttgtgtgataaactaatagagttatacagtttaccgggtatcgttgatgtaacctaggtaacgcagcgatggcagttccagaaagtggggatgaagatgttcctcaagcgacttgaagtaaaaggatttaagtcttttgcagaaccgatactagtagattttgtgccaggcgtcacagcagttgttgggccgaatggcagtgggaaaagcaatattgccgatgcggtccgttgggtgctcggcgaacagagcgctcgatcgctccgaggcgcaaaaatggaagacattatttttgcaggaagtgattctcgtaaagctgtaaatatggccgaggtttcacttattctcgataacgaagacggccatttggcgattgattacagcgaagtaagcgtaacaagacgtttgtaccgctcaggggaaagcgaatacttaattaaccgccactcgtgccgtttaaaagacattgtcgatttgttcctggactctggccttggccgggaagcgtactccattattggtcaaggaaaaatcgaggaaattctaagcagcaaggctgaagagcggcgaaccatctttgaagaagcagcaggcgtgcttaaatataaaacaaggaaaaacaaagctgtgaagcggctagagcaaacggaagaaaacttagtccgtgtcgccgacattttaaatgaattagaagaacaagtagagccacttcgcgaacaggcatccattgccgaagagtacaaattgttggccgaagaacaacggacattagatatacaagtgattgcacaggaaattacagagctttacgaaaactggacagcggagtctgacaagctaaaaacgttaaaagagcagctgcaagcgcgcaaagacagcttagaaaaggctgaagaaaagcttgcgtcctaccgtgaagagcatgccgctatccggcaaacggcagcagacctccataaaaaacgattagaagtgagcgaagcgcttgaaaaaaatgaagggcgccgcggtgtgctggaagaacgaaaaaagcatgccctccataatgaagaacagctgatcgagtcgataaaagagcgtgaagccaatcaaaaagcggtgcaacaaaaactggacgaactgttcaaacaatatgagacggttaaacagaaagacgacgaattaaaggcggaatttgatgaggcgacacgccatttaacccgttcaaaagaagacgtaagcagcgaattggaagatgcaaaaggcgattacattgaatggctgaatgaacaggcatcgcttcgaaatgaacggcgttacttggaggagcagttgcagcaaaaacaacgcaatgcacgtcgggcagagtcggcggctgcagctagcaaaaaagaagcacaacagctagagcaagaagcagcagaacgggcacaggtgctaaaagcggcagaacagtcttttgctgaagcaaaaatgacgcatcatcgtcacctatctgaagaagaaaccgttaaaaaccgctactataaacgagaggcaaaactgtatgaagcctatgggttgttgcaaaaaatcacttcccggcgcgaagtgctccaagaaatggaagctgaatatgctggtttcttccaaggcgtaaaagaaattttaaaacagcggggatcgtccctttcaggcatcgttggggcagccgccgaattaataagtgtgcctaaaaagtttgaagcggctatagaattggtgctcggcgcccaagcgcaacacgtggttgtcgacgacgaggctgctgcgagagaagcgatctcatttttgaaacaacggcgcctaggccgggcaacgtttttaccgctaactacggtcaaagcgcgtgtcgttccagaagcagtcatatcagcgatagcgaatgagccaggttacttagggatcgctgcagatgtggtcgaagctaagcctgaacataggcaggctgtcggctttttgctcggttcgaccatattggcggagacgcttccacaagcaaacaaaattgcgaaacgcagtggccatcgttaccgtgttgtcacgctagaaggagatattgtcaatccaggcgggtcgatgacgggaggcagcgccaagcaaaatcagtcctccttacttgggcgaaagcgggaaaaagaggaattggacgccaaaaagaccaagttagaagaagcgattcgcgatttagaaaaacaagtaaagcaggacaaagaacggcgccaagagctgcaagaaacgattgctaaagtcgaagcgcaaaaagcgcaagcgcaagaaacgcttgaagaggctcaacgtgctcaccaggaagcaagcattgcctatgaacgttctaggcaggaagtagagcggatcgaacagcaatcgaaagaacaagatgcggaagaagccaaaacgcaagaccgctttctggaaattgaagaggccgaaaaaaaagcgattgctgagtcaatgcgcttagaagaaaaaataaaacggttggaagcgcgactggcgtctgagcaacaatccaaagaagaatggcaagcgaagttaacggaactccgagtcgcacgtgcagaaacgaaacaacaactccaatacgtggacgcacagcgccaagaactcacagcggctcttgaaaaagaacaacaagagttattgcaagcaaaagagcatttagcccttgtaacgagcagtgccgacgaacaagcgcatacctcccagtcacttgctgaacaaattgctgctggaaagcaggaaaaacaggctttggcagcaaagcttgcagagctggaagaaaaagaagcagcattaaatgaccgttacaaacaacttgaagcagaaacgaagagcgcccaaggcgaacattcctacttactagaggaaagccagaagctagaagtgcgtgtcaatcgacttgatgtcgacttggactatcgcctaaatcgccttcgtgaagagtatgaactttcctatgaagcagcggcaagccgctacccgctttcccagcctttggaacaagcgaaaatgcggctatcattggtgaaacgttcaatcgatgaactaggaacagtcaacttaggcgcgattgaagaatatgcccgtgtccgggagcggtatgagtttttgcgtgaacaaaaaagcgatctgctcgaggcaagggtttcactcgatcaggcaattgcagagatggacgaagaaatgtccaaacgctttggtgagacgtttgcgaacatccgcgcccactttcaaaccgtgtttacgaaactatttggcgggggcgatgcggatctcgtattgacgaacaaagacgatttattaacaacaggaattgagattattgctcgccctccaggaaaaaagcggcagcaacttggactgctttctggaggagagagggcgctgacagcgatcgcgcttctatttgcgatcttgcaagttaggcctgttcctttctgcgtcctcgatgaagtcgaagcagcgcttgatgaagcgaatgtaagccgctttgcccagtacttgcatgatttctcacaaaaaacgcagtttattgtcattacgcaccgtaaaggaacaatggaaggggctgacgtcctttacggtgtgacgatggaagagtcaggggtttcacggctcgtatccgttaaattggaagaaactcggcaattaattggaagctaggaggaaaatgcgtgagcttttttaaaaaattgagagaaaaaatggcgcagcaaacgaatgaagtagcggacaaatttaaacatggattagaaaaaacacggacaagcttttcgggcaaaatcaacgagcttgtcgcccgctaccgtaaaatcgacgaagatttttttgaagacttggaggaaatcttgattggcgccgatgtcggtgtttcaacagtaatggaacttgttgacgaattaaaggaagaagtgcgtttgcgcaacttaaaggacaccgaagagatacagcctgtcatttccgaaaaactagctagtctcttagaaaaagacgataaagacacaacgctccaattgcaagaagggttgagcgtcattcttgttgttggcgtaaatggtgtcggcaaaacgacgtccattggcaagctcgcccattatttaaaagggcaaggaaaatctgtcgtgctcgccgctggcgatacattccgagcgggtgcgattgaccagcttgacgtttggggagaacgtgttggcgttccagttattaaacagcaagaaggctctgacccggcggcggtcatgtatgatgcgattgcttgggcacgctcccgcaaagccgatgtgcttatttgcgatacagcggggcgcctgcaaaacaaagtcaatttaatgaatgagctagcaaaagtaaaacgcgtcattgaaagggaagtgccaggagctccccacgaagtactgcttgtcgtcgatgcgacaacaggccaaaatgctttgtcgcaagcaaaagcatttgcagcttcaacggacgtgagcggccttgtcctaacgaaacttgatggcacggccaaaggaggcattgtcattgccattcgccaagagcttgatttgccagttaagtttatcgggctaggtgaacagaaagacgatttgcagccatttgacgccgagcaatttgtatatgggctgtttcaagatgcgatcgatgccgaaaaggaatgaccagtgcctgtttcgatgttaagataaaaacttgacagaagcaatgagttgcggtagtatcggtaattgtaaagggaaaagacttaacaaggagcggtttacatgcttgataagacgttacgcatgaactacttgtttgatttttatcattccttgttaaccgaaaagcagcgcaactatatgtcctattattatcttgatgatttatcgcttggagaaattgcagacgaatatgacgtcagccgccaagcggtttatgacaatattcgccggacagaagccatgcttgaagaatacgaacaaaagctgaggttgcttgagaagtttgaaacgcgccgtagcttgctagcagagctgcgcaaagcgattgcttccgatcaagctgtcgaggcgtgcaactcccttattgaccgtatagagaaacttgattagcattcctttcaaggaggcgattggatggcatttgaaggacttgccgcgcgcctgcaagatacgttgacaaaaattcgcggcaaaggcaaagtcagcgaacaagacatcaaagaaatgatgcgagaagtccggttggcactgcttgaagcggacgttaactttaaagtcgtaaagcaatttattgcgaatgtgaaagaaaaggcgcttggccaagaggttatgaaaagcctaacgcctggccagcaagtgatcaaagtcgtaaacgaagagttgaccgcattgatgggagccgagcaaagcaaaattgctgttgctcaaaaaccgccaactgtggtgatgatggtaggcttgcaaggcgctgggaaaacgacgacaacggcaaagctcgccaatcatttgcgcaagaagcacaaccgcaagccactgctcgttgcctgtgacgtttaccgtccagcggctatccaacagttggagacgcttggcaaacaactgaacatgcctgtcttttccaaagggacggacgccaatccagttgacatagcgaaagaggcagttgcagctgctaaagcagaacatcatgattatgtgttgatagatacggctggccgccttcatgtagatgaaacgttaatggcagaactgcaagatatgaaagcagctgttactcctgatgaaattttgttagtcgttgattcgatgacaggtcaagatgctgtcaatgtcgcagagagctttaacaaccagcttgatgtcacaggtgctgtgttgacgaaactagatggcgatacgcgcggaggggctgcgatttccattaaggcggtaacaaatacgccgattaaatttgccggcatgggtgaaaaaattgaccagctagaaccgtttcatccagataggatggcttctagaattctcggcatgggcgatgttctgtcattaatcgaaaaagcgcaagcgaatgtcgatgaagaaaaagcaaaagagcttgagaaaaaacttcgcaacatggacttcacgttcgatgattttctagagcagctcgaccaagtcaaaagcatggggcctcttgaagatttgctagggatgatgccggggatgaataaggcaaaaggcatgaaaaacctaaaagtcgatgaaaagcaattgactcgagttgaagcgattgtaaagtcaatgacgcctcttgaaaaacgagatccgagcgtcataaacggcagccgccgcaaacgtattgcaaagggaagcggcacgacaatccaagatgtcaaccgcttgttaaagcagtttgaagacatgaagaaaatgatgaaacaaatgaccgccatgcaaggcggcaaaggcaaaaaacgaggcaaaggccttggcgggcttaagctcccgttctgattaaggaatccattttaacagtttgtcttgcagattgttagaattgatgatatgataaaaaattgtgtgcaattatttttggaggtgtacagcaaatggctgttaaaattcgtttaaaacgcatgggttcaaagaaagccccattttatcgtgtagtagttgccgattctcgctttccgcgtgatggccgctttattgaagagattggtacgtacaacccaatcgcgcaacctgctcaagtaaacattaaagaagacaaagcgctagaatggatgaaaaaaggcgcgaaaccttctgatactgtgcgcagcttgttttcgaacgctggcctaatggaaaagctacacaacgaaaaaaacggtaagtaatcaccccttaaggaggatgggctagcatgaaagctttagttgaacatatcgcccggtcgcttgtcgatcatccagaggcagttcaagttgaagaaattcatgaagaaaaggcacatgtgttgcgcctttcggtgcatcctgacgatattgggaaagtgattggcaaacaaggaagaacggcaaaagcgatccgctcggtagtgtatgctgcttgcggcaagcaaaacgggcgggtgcgcctcgatattgtcgactaaaagggcggggggaacctcaccctttttttgtatgaaacaaagaatggagggctttacgtgaaatgcatccgcacggccaccgtaaagcatgtgttaacggagtcgaaaaaagcagacttgaagaaatcatttgaacgtgatttaacacaaatcgaaacagagttaagccaaatggaatttcagcttcagcgggcgctaaaaccgatgaaacatacgaccgcccatggcgaactccaacaaaaatacaggaaagaaataaagcggagagaagaacggatggcttctctgacgtttcggattgagcagttaatgaatttgccaattgggactgaactggcgatgggaacaacagaaatcattctcgatgttaaggaaggcgacaagtggatagacgaagaaacggaattgacgattgtcgtcaatgatgggtatattgctgaaattagagagggcggggcaagtaatgacgaactggtataatgttggcaggctagtgaacacacacggagtccgcggagaggtgcgtgtcctctcaaataccgattttccagaggaacgctatgcgaacggttcggttctaaaggtggcgaaatctcctcaagcagaggggacacttgtaaccgttcgtagccatcgaacgcacaaaaacttcgacttgcttacatttgaaggctataactccatcaatgaagtcgaatgttttaagggaagctatttatatgtatcagaagatcagcttagcgaattggacgagcatgaatattactaccatgagattattggctgtacagtcgtcgatgaagaaggcaccaagctaggcaaaattaaagacattattgaaacaggagcaaacgacgtctgggtggtcgacagacagcagcggaaagatttgctgttgccgtacattgaagaagtggtcaaagaagtggatgtggaaaacaaacgcatccgtgtccatatcatggaaggcttagatgacgaatgaaaatagatgtactaacgttgtttccggacatgtttacgggcgttttcggctcgtcgattttgaagcaagcaagcgacaaggggattgtctccttccagacggttgattttcgcgaatacgcagcgaacaaacaccgtaaagtcgatgattacccttatggcggaggggcagggatggtattgagcccacagccaatttttgacgccgtgtctgcgttaacgaagaacggaaaaaagaagccgcgtattatcatgctttgtccacaaggagagcagcatagccaacaaaaagcggcagaattagcaaaagaggagcatttgatcttcctatgcggccattatgaaggctttgacgagcgcgtccgtcatcttgtgaccgatgaactgtcgattggcgattatgtgcttacaggtggagaactcgcggcaatggtcattgccgacagcgttgttcgccttttgccaggcgtacttggaaatgatgaatctgcagttacagactcctattcaacgggcttgttggaacatccccattatacacggcccgccgattttcgcggcatgaaagtccccgatgtactcctttctggccatcatgccaaaattgaagagtggcggatggagcaatcgctgcgccgtacgttagagcggcgcccagacttactaaaagggtatgaacctactgccaaagaagcagacatccttaagcggctaatggacaagcaagagtaaggcgaacactccgggagatgtcgcccgataaggttgtcgccaaaaaacttgccgcacggaccaaaaattgcttccttttaagtaatccacgttttccaaaaaagcgatgttcctttaccgaaggatcatgtatactaaatagcattatagcaaaaggtggtctcatacaatgcatgtagaacaaacgctgattgaagcgattgcagccgcagccagtgagttccaaaatgacatcgacgttgaactcgagcagccagctcaattgatccatggcgactattcgacaaacgtggcgatgaagcttgcacgcgtagcgagaaaaaacccgctaacgattgcggaaacgataaaagaaaagctagagcgtcagcgtttgccagtcacaggaatagaagtagtcaaaccaggctttattaacttttttattgaatgggatgaagcgttggctgacggcgaagagccacaggctctttccagtagcggcaagacggtgatcgaacatacgtccataaatccgaataagtcggctcatattggtcatttacgcaacgcttgcataggcgatacgttggcacggctcctgaaaacatgtggcgaaaatgtggaagtacataactatgttgatgatttagggaaccagcttgccgacacgctgactgcgttgctccatacaaactcagacagcgaagcgacacgctttggcgattattgctggaatgtttattcacgcttaaatgaggcatacgacaaagggaccatttcgacaagtatccgtgacgaagtgctacataaattagaagaaggcaacaacagcacggcatggcttggctatgtggtcgccgataaaattacttcagaacatattgaggaaatgggccaatttgggattgactatgatttgctagtatgggaaagggacatcgttcaaaaaggtttctggcagactgcctttcagaagctaaagcagagtgatgtgtttgtcaaacaggacagcggtccacaagcaggctgttgggtgcttcggatgtcagacaacgaaagcgaggaaggcagcgagcatcaaagcgataaagttcttgtccgctcaaatggcgtgttaacgtacacagcaaaagatattgcttatcatatgtggaagtttggccttctcgacgatgattttgcctataaagaaaaatggcctggcctatggacaaccgctagctcaggcgtgccagccgcttttgggcgaggcgatgcagttattaatgtcatcgactaccgccaagaatacccgcaaaaggttgtcaagcaggcgcttgctgctgtcggctatgaaaaggaagcagagcggcttttccatgtgccttatggtgtcgtttcactaagtaaacaaacggccagccagcttggtcttgaaacggaagatggaaaatcggtctatgcaatgtctgggcgtaaaggcatcggcatcaagattagcgagctgattcaacatatgaaggaagcggtccgcgcgcaaagcacggatgcgagcgaagcgaccgttgaagcgctcgcgtttgcggcgatccgttacaatatgcttcggtataacacgacatctgacattgtgttcgatttaacagaggcaacgcaagtgacaggcaatacaggcatctatttgatttacacgtatgcccgggcaaacagcattattactaaagccaaacaggcaggcttgtctccagaaggggcaacctttaaaggcgctgaagacgcggaacgggcgttgctcaagcacttggcaggctgggatacagtcaagcgcaaagcagctgcatcgtttgaaccaaatttaatttgtacttttgcttttgagcttgcaagcctctataaccgtttttattcacaatgccctgttttaaaagctgatccgttagaacaagcgaagcgtctagcgatcacagaacgtgttagccagcaactcgaacgcgttttcatgatactcggtttgccgagcttgaaaaagatttaatctttattgtgcaagcttgttttctatgctatgataatggttgtggctgattgaacgttcttagacggacggttagcaagattacgatattccgctgctgcagtgttggcatgaatgtctgtagggaaggagggaacgatacgatgagcaacctcattacagaaatcacaagtgagcaattgcgcacagaccatcctgatttccgtcctggcgatacgctatcgatccacgtaaaagttgtcgagggtactcgcgagcggattcaagtgttcgaaggcgttgttattaaacgccgcggctcagggattagcgaaacgtttactgcgcgtaaaatctcatacggtgtaggtgttgaacgtacattcccattacattcaccaaagatcgataagatcgaagtgaaacgttacggtaaagtacgccgcgcgaaactttactacttgcgcagcctccgtggcaaaaaagcacgtattaaagaaattcgtcgttaaacatgcggcatttgatgaaaagagaaggaacgttcctcgtaaggaggagcgttctttttttggggcaaaatagggacataagaaaaagggcctctaaaaaaatcgactacggcaattgtccaggcgttatcaaggcaacagcacgctctaattaaagtgcgaagctggatggtcagcgagtcagcggaaaagtgacgacaacatagaaagcaaataggataatgccaaagccggaaaagaacacaattttggcaggtttaggccaattttttagccacccccatctcttactgtcttggtcaatccacaagaaatcggcaatgacaaacacaaaaataagaacgagtgccaatgtcggattcatactgaccaccccttttttattgttgtgttcatcctatcatatttgggagtaaatgggttgtcattttgctgcttttagaaagtttagtggttgtatgtgttgtgcagaattttgcagaaccgccaagtgactacgtgcttctttttatggtaaactaaagagaaaaagaggaggcatcacaggtggcatttcgcggatttccaattgagtgggccaaagccatttgcatcgcgttatgcgccacaatgctcgtacgcctttttttgtacgcgcccattgttgtagacggccattcgatgcagccaacgctcgactctggggacaaaatgatcgtcaaccaaattgggtatgtttttattgagccgaaacggtttgatattgttgttttccacgcacctggcgggaaagattatatcaaacggatcattggcctccctggcgaccatttgaaatatgaaaacgatacgctttatattaacgggaaagaaacagcggaaccttatttaaactcgctgaaacaaacgctttacggcgaccaattgcttactggcgattttactctggaagagatgatcggcgaagaagtaatccctgacgactattattttatgatgggcgataatcgccgtttaagtaaagacagccgtgatattggcctcattccgaaatcagaaattatcggcaaagccaacgtcattttttatccgtttgaacatataagcattgtcaatgattaatgggctatttttgcccacaaagcaggtgaaatggttgaaaacgattcaatggtaccctggccatatggccaaggcacgccgagaaataaaagaaaaattaaaactgatcgatgttgtgattgaacttgtcgatgctcgccttccccagtcttcccgcaatccactcattgatgaattggcgcaacaaaagccgaggctgatgctgttaaataaggctgatttagcggacccagcggaaacggaacggtggcgcgctttttttaaacggactggagctgaagtcctggcaatcaatgcgcaaacaggagcaggcgttaaaaacattgcgcctgcctgcaaaacgctagcaagcgccctctatcaaaaatgggaacaaaaagggatgaaaccgcgtccgctgcgagcgatcattctcggtatccccaatgtcggcaaatcgacacttattaatcgccttgttaataaacggcaggcgaaagttggcgatcgccctggagtgaccaaacaacagcaatggatcaaagtcaagcaggaacttgaacttcttgacaccccagggattttatggcctaaatttgatgatcaagaagtcggtttacgccttgctgcaacaggtgccattaaagacgaattgctagactacggcgacgtggctgcctatgcgcttcgctacttagcagctgaatatccagatttgctcgaagcacgctatggcatcgaacgaaacagcgaagaggacgacatcgtccctttgtttgaagcgatcggaaaaaaaaggggttgcattgttcgtggaggccttgtcgattttgataaaacggctgaattgatcttgcgcgagctgcgtagcggcacaatcggaaaagtgacgttggaaaaagcggaacacgaagcgctgtaggcatcactcaaactaatagacgaggaatgcaggcgagagacgttgcacaaatggacgtatttcatggacagtgtttttttggacatggaacgaaagcatagtctgctggaaacgacgacgcctgtcgacttcgccttggaaaataagcgacgaaactgtatggatcatatcggcaaagaagctgataaaaagcaagagccgccatccttaagagcttctccaattccttggcgttatacatactattctattgctagtttcatagacaaggaggaaaggcattggtgccaatcgcggcaatccgcagaaagctaatggacgggtccattagccacaatgagttagacgagttaaaaaaagatcagcgcaaaggagtgcaagagctgcttaagcgttatcaagcgcagcaggaaaagcagcaaacgcttatacaaatgcataagcaaatgtggcgttacgaacaagaactaaaacagcgcggttatgtagctgtttgcggcgttgacgaagtagggagaggcccccttgctggccctgtaacagcgtgcgcttgcatattgccagatggctttcaattattagggctgacggattcgaaaaaattgtcaaaagccaaacgggaagaatatgcaaaaatgatttccgaacaagcagtcgcctattcgattgccagcgtaagtgcagcggaaattgatgaaatcaacattttgcaagcgacgaaaaaggcgatgacgaaagcaatcaacggcctcagccagaaggctgaccatttgctgctcgatgccgttcgtcttgatgtgccaatcgctcaaacatcgcttataaagggagacgccaaaagtttatcgattgctgccagctcagtgctcgccaaagtatggcgtgaccgttatatggaggaattggcccagacatatccaggatacggttttgacacacatgctggatatggcacagcgtcacacttacaagctttgcggacttacggaatgacaccggaacaccgcaagtccttccggccggtgctggaagaaagccaaggcttgatttacggtacataaaaaaggagaaaccaatggaaatcggaggtttgttcgttgatcgtgtaaatggatcaggccaaacattggcctttcatgaagggcaagtcttgcgtggcgttgtgctgaaccgttttgccgattctgggcttgtgcaaattcaattgaaggatacacgtgtggtggccgagctaaaagccgatttgacggtgggcaagacctattggtttacggtgcaaaaaggacaacctttgccgatcttgcaaaaagcggcagaaggccattcatatgaacagcttctcacatcgtgggatagaacgccttcacaccgcaatgtccgtgtgcttgcattgctggattcaactggattgcctttgacaaaaaagggatttgcaggcgtggcccacgcgtatgcatcattgaagctgtctgaacagcagacaaaagaagcattgctttacatcaagcagcagaacgtaagcgtgacagccgccacgctccaagccgcccatgtggaagtaaatgcatctgagtcactaagtgtcgcgctacggcagtttgctgcagcttggaaacatacagtgcctgcccaactccttttacaattggaggagcttgggcgccagctggaagcgggcgaatttcgacgaggcgagctgttaaaagcgtatctgagcacgctcggacgggtgacggagctacttgagcctattcggaatggagcaggagacagaaaagcaaaaaaagccgctgaagacctggctttgcgcttttctctttaccaagaaggcacgcttatcccttcgctcaaacaacaatttattcctttgtttggccatgattggttgttgcagtgggaaagtgctgctgagaacagcgaggagaaaaagccgctgcgtttttatattagcgctgagcttgaacagcttggttatgtattagtagatggacgtcagcatgaacagcggctattcgcgacgatttacagcgggcaaccagcaccgcctgcttttgtttcgttagtggaacaactccgtgatcgattggcagcggcaggttatacacttgaaacatgccgttggctgaaaagcgaagcccatacaaacaagacaatgccccgtttgcctgctaaaggagtcgatattcgcctatgaagcaaaaacgtatgaagcgcgcctacgctctttcttacaaagatggagacgtggcgccgcgccttgtcgccaaaggagcacggaaacaagctgaagccatggtcgctgaagcaaaaaaacagggcatccccgttatcaagcaccagcaactttcagaagagctcgctcatcttcgtgagatgcaattcatccccgagtccctctatgaagtagccgccgaactatttgtttttctccattccctcgattctgttcatgatttttctggatcagcccatactaaaacagagaaagggggaaaagagatggatgaaaaacgtaaaatcggcgaagaggaattttccgatgaatttggccaacatcgccctgcgcttgaaaaggacatgatcgcaaaggggctgaaggcactgttttcgaaaaaaaacaaaccgcgccaagaaagcgctgagcccaccgaggaaaaacagaaagataaaaaatgaaacaaattgtcggaatgataacggttacccctccccaagcggcgaaaaaagtgctaaaatggaaaagaatttcgtattaacacgaaaattctcgtgcaaagcaaagcacgtgattacaggaggctggagagagaatgaatatccatgagtaccagggtaaagaaattcttcgttcgtacggcgtagccgttccaaacggaaaagtagcattttctgttgatgaagcagtagaagccgcaaaagagcttggctcatctgtatctgttgttaaagcacagattcacgcaggggggcggggaaaagctggcggcgtaaaagttgcaaagaacctcgatgaagttcgtacatatgcggaagaaattcttggaaaaacgcttgtcacgcatcaaactggaccggcagggaaagaagtaaagcgcttactcattgaagaaggctgtgacattaaaagcgaatactatataggccttgttgtcgaccgtgcgacttcaagcgttgtcttgatggcttctgaagaaggcggcactgaaatcgaagaagtagccgaaaaaacaccagaaaagatctttaaagaagtgattgaccctgctgtaggcttgcaagggttccaagcgagacgcattgcttttaacataaatattccaaaagaacttgtcggccaagccgtcaaatttatgatgggcttgtaccaagtgtttgtggataaagatgcatcgattgctgaaatcaacccacttgtaacgactggcgacggcaaagtcatggcattggatgccaagttcaactttgattcaaatgcgctttaccgccataaagacattttagaattacgcgatttggaagaggaagatgtaaaagaaatcgaagcgtctaaacatgacttgaactatattgccctagatggaaacattggctgcatggtgaatggagctggccttgctatggcaacaatggacattatcaaacactacaacggcgatccggctaacttccttgatgttgggggcggcgcaacggcagaaaaagtaacggaagcgtttaagctgattttgtcagacgaaaacgtaaaaggcatttttgtcaacatctttggtggcattatgaaatgtgacatcatcgcggacggcgtcattgcagcaacgaaagaagttggcctagaaatcccgcttgttgtccgcttggaaggcaccaacgtggaacttggcaaaaaaatgctaaaagaatcaggcttaaacattactgcagccgattcaatggccgatggcgcacaaaaaatcgtttcattagtgaactagaagggtggagctaagcaaatgagcatcttaatcaataaagatacaaaagtgattgttcaagggattacaggcgctactgggctgttccatacaaagcaagcgcttgaatatgggacaaacatcgtcggtggcgtaacgccaggaaaaggcggaacagacattgaaggcgtacctgtatttaacacggttcaagaagctgtagaagcaacaggtgccaatgcgagcgtgatttatgtaccgccagcctttgccgctgatgcgataatggaagcaaccgatgcagaacttgagcttgtcatttgcattactgaaggcattcctgttctagatatggtaaaagtgaagcgttatatggcaggcaagcaaacacgcctcgtcggaccaaactgcccaggtgttattacaccagaagaatgcaaaattggcatcatgcctggctatattcataaaaaaggccatattggcgttgtttcccgttcagggacattgacttatgaggcggttcatcaactatcaacggctggcattgggcaatcaacagctgttggcattggtggcgaccctgtaaatggcactgattttattgacgttctatctttgtttaatgaagatccagacacgtatgctgtaattatgattggtgaaattggcggcactgctgaagaagaagcggcagaatgggtcaaagcaaatatgacaaaaccagtcgtaggctttatcggcggggaaaaagcccctccaggaaagcgaatgggccatgcaggcgcgatcatctcaggcggcaaagggacggcagcagagaaaatcaaaacgatggaagcgtgtggcattcgtgtagctgctaccccttctgatatgggagaaacacttattgaagcattgaaggcgaacggcttgtatgaaaaaagcctcacccacgaaaccgcaaaataatggtatggcttttggccccttgcctcgttgtaaggggcttttcaaagtgtggcagagttctcccccggaacgcttaaacaacgttatgcggtccattcaaatacagaaaggagttgtcccctatttcttttgtacgacgctatgtacacgtgcatacgtggctgtacggccattatcgtgcgttttcgaaattgctctgctgggatccgtcactacaggcgccttatcacgctagccccttggaaattgctgctaagctcggcataaatgaaaatagcgccactgctttttggcgccatctccataagacaactcctgaaaacatgtacgccaaccttgttgagacaggtattcaagtactgccgctttttcatcctctctacccgcctctattaaaaacgatttacgatcccccttatttgttatacgcaaaaggaaacatcaaacgattgcaaacgaaaaaaattgccatttgcggcacgcgcacgccgactgcttacggccgggcagcgcttgcgacgattgcgaaaccaatttccgaacattctttgacaattgttagtggaatggctcgtggtattgatgggctggcccatgagcaggcgattcgaacaggtggcgccacgattgccgttcttggttccggttttgacaacatttatcctcctgaacattctacacttttccatgcattggcagaacaccagttgctgttaagtgagtatccgccgtttgtaaaaccccagcgctggcactttcctgtccgaaatcgtattataagcggtttgtcacaagcagtgatcataatagaagcaaagcggaaaagcggatcgcttattacggccgacttagcgttagagcaagggcgtgatgtctttgctgtgccaggacctgtcacttcagcacagtcggaaggcacgaattggctcattagccaaggcgccggctgcctatacgcgagcgaagcattattcgaagcaatgccgcaacttttgtcaaaaacaggcgaatcccagtctttttaaaccggctgctttctaccgtttgacaaatggggaatgtctgtttaataatgaggaagatttacattatgaataagttgagagggagctgctttacatgtccgattatttagtaatcgtggaatctcccgctaaagccaaaaccattggcaaatatttaggtaaaaaatatgtggtcaaagcctcgatgggccatgtgcgtgatttgcctaaaagccaaatgggcgttagtgttgaagacaattatgagccaaggtatattacaatccgcgggaaaggccccgtgttaaaagagttaaaaacagctgccaaaaaagccaaacgcgtttatctagctgccgaccctgatcgcgaaggagaagcgattgcttggcatttggcacacagcttgaatattgacgaaaactccgattgccgtgttgtttttaatgaaataacaaaaacagcgattaaagatgcctttaaacatccacgtccgatcaatatggacttggtcgatgcccaacaagcaaggcgtattttggatcgccttgttggctataacatctcgccgcttttgtggaaaaaagtgaaaaaaggcttgagtgctgggcgcgtccagtctgtcgcagtcaaactgattacagatagggagaaagaaattcagcaatttgtgcctgaggagtattggagcataacggggacgtttttgcttggcgatgagccatttgaagcaaagttttatggccgaaatggcaaaaaagaaagcttaacgagtgaagagaacgtcaatgaagtgttaaagcaaataaaaggaaaacaatttgctgttgctgatgttgtcaaaaaagaacggcgccgcaaccctgtctcgccttttacgacgtcgtcgctgcagcaagaagcggcaaggaagttaaatttccgcgctaagaaaacgatgctgattgcccaacaattatatgaaggcatcgatttagggaaagaagggacagtcggtttaattacgtacatgcgtaccgattcaacccgaatttctgatactgccaaacaagaaacatacgagtacattcgctccacatacggcgaagagtatgcccgtaaaggggaaagaaaacaaaagcaggacaaaaatgcccaagatgcccatgaagcgattcgaccgacttcggttaagtatgagccaaaacaactaaaagagtatttgtcacgggaccaactccgcttgtatcgcctcatttgggagcgccttgtcgcaagtgaaatggcacctgcgatcatggatacgatgacggttgatttggaaaataatggtgtaaagtttcgggctaacggctcaaaagtcaaatttcctggttttatgaaagtgtacattgaaggaaatgacgacaataaaaaagaagaagatcggttgttgccagcgttggcaaaagggcagcaagttgaaaaaacagaagtgacacccaatcagcattttacacagccgcctccacgctatacggaagcaaggcttgtaaaaacacttgaagaacttgggatcgggcggccgtctacgtatgcgccaacacttgataccattcagcgacgtggatacgtcgccctagatgaaaagcgcttcgttccgacagaacttggtgaaatcgtgttggacttgattgttgaatttttccctgaaatcctcgatgtggaatttacggcgaaaatggaagaagaccttgatagcatcgaagacgggcgggacaactggattagcatcatcgaccagttttaccaaagttttgagaaacgcttaaaagtggctgaagaagaaatggaagaagtcgagattaaagacgaaccggctggagaagactgtgaaaaatgcggccatgaaatggtctataaaatggggcgctacgggaagtttatggcctgctccaacttccctgaatgccgaaacacaaaagcgattgtcaaagaaattggcgtcacttgccctacgtgtaaacaaggaaacattgttgaacgtaaaagcaaaaagcgccggattttctatggatgtgaccgttacccagactgtgaatttgtgtcttgggataagccgatttcgcgcccgtgcccaaaatgtcaagggttgttagtggagaagaaatcgaaaaaaggtgtgtttgttgcttgcacttcatgtgattatgaggaagaaaaacagtaatttgtcgaaaaaaggctttagcgaatgctattagttgaaatcaagctagaaagatactatgataggggtacttgatgatgaaagccttcactctgctaaggagtggaggcatttgtgtgaaatgattgtcgggaaaaaggagcatttgtttaaatgacgcataaacagtcgataaatgtaataggggctggtctcgctggtagcgaagcggcttggcaaatagcgaaacgaggaggccatgttcggctctatgaaatgagaccggtgaaacaaacgcctgctcatcatacggacaagtttgccgaacttgtatgcagcaattcgttaaggggcaactcacttgccaatgctgtcggcgtgctgaaagaggaaatgcgccatcttgattcagtcattattaaagcagctgatgaagcagccgttcctgctggtggcgcccttgctgtagaccgccatgattttgctggcaaagtcaccgaatatgtcaaaggccatccaaacgtaacagtcgtccaggaggaagtgactgaaatacctgaaggcccgacgattattgctaccggtccactcacttctgaagcattggcggaacaattaaaggcatttagcggcgaagaatatttatatttctatgacgctgctgcccctatcattgacgccgaaacgatagaccgcgacaaagtctacttaaaaagccgttatgacaaaggggaggctgcctatctcaactgtccaatgacagaagaagaatttgatcgattctaccaagcattgattgaagcggaaaccgttccgctgcgagaatttgaaaaagacatttttttcgaaggctgcatgccaattgaagtgatggcttcccgtggcaagaaaacgatgctgtttggaccattaaagccagttggactagaagatccgaaaacagggaagcgcccttttgctgtcgtgcagttacggcaagacaattcttccggaacattgtacaatatggttggtttccaaacgcatttaaaatggggcccgcaaaaagaagtgatccgcatgattcctggtttggaaaacgctgatattgtccgctatggggttatgcatagaaatacgtttttaaattcccctaacttgttaaagccgacctaccaatcgaagaaacgcagtgatttgttctttgcaggacagatgacaggggttgaagggtatgtagagtcagcggcagcaggattggttgcaggcattaacgcttttaaatggacgcaaagccaggagcttgctgtttttcctgaggaaacgatgatcggtagtatggctgcctatattacaaatgctaatgcgaaaacattccagcctatgaatgcgaactttggtcttgttccaccgcttaatgttcgtataaaagcgaaaaaagaacgctatgaggcgctagctaagcgtgcgttggagtcgattcagaattttatgaaagaagtgtgacatcagttgcttctccctcttgtactatggtaaaatttattagttctaagagggaggcatgaatgtggaattatctgaacggcttttgattgaccaatttgtccgctatgtccaagtcgaaaagaacggttcaaaatggacaatcgaccactatcgaaaagacgtacagcaattcgccgcatttatgtcggcagcgggcattgccgagataaaagacgtaaagcaccaagatgtccgcctttttataagcgagcttgtcgataagaagtatgcgagaaaatcgatcgcaagaaaattgtcggcgcttagaagctttgggaaattcttaatggaagaagggcatattagcgaaaaccctttcttgcacacgcatttgcctaaacaaaaaacacgtttgcctactttcctctatgaagaagaaatggagcattggcttttagcgcttccagcaaataagcctctcgaaaagcgtgataaggcgatcatcgagttgctgtatgcaacgggaatgcgtgtttcggaatgcagcatgttggcacttgaccagtgggatcgagtaagcgagacggtacgtgtttttggaaaaggccgcaaagagcggtatgttccagtagggaaaatggctgttagcgctgttgaatcgtacatacacgaggcgcgtcctaagctactccgtgcaaacgatccgacttcccatttgtttttgaactatcgtggaggagcgttaagtgatcggagcattcggaagattgtggaaaaaaggctggacgaagcggctatgcagaaaaaaataagcccacatgcgattcgccattcctttgcgacccatttgcttaatgctggtgctgacttgcgcgctgtccaagagttgctaggccaccaatcgcttaagacgacacaagtttatacacatgtaagcaaggagcggctctatgccgtttataaaggcgcccatccgcgagcctaagtttataaaaaggagcgtttgacaatggagggtttccacgcaacaacgatttttgcgattgcccataatggcggggttgctatggctggcgacggccaagtgacgtttgggaatgctgtggtgatgaaacataccgcacgcaaagtccgcaggctataccataataacgttcttgcaggctttgctggttcagttgctgatgcttttacattgttcgaaaagtttgaagcgaaactggaagaatacaatggcaatttgcagcgcgcttctgtcgagctagcaaaggagtggcgcagcgaccgggtgttacgaaaacttgaggcgatgctaattgtgatggataaacaggctttgcttctaatttcgggaacaggagaagtgatccagcctgacgacgggattctcgctattggctctggaggaaattacgcactgagtgcaggacgtgcgctaaagcgccatgcccctgggttgagcgcacgtgaaatcgccgtagctgcccttgaaacggcaggagaaatttgtgtgtatacaaatgaccaaattgtcgtagaggaactgacagagtgatgatgaacgattggagggtaaagcaatgacaagcacattgacgcctcgggaaattgtcgagcggttgaaccaatacattgtcgggcaagacggggcaaaacgatctgttgctgttgcactgcgtaatcgctaccgtcgtacaaagcttgatccttccatgagggaggaaattactccgaaaaacattttaatgattggtcctactggcgtcggtaaaacggaaattgccagaaggcttgcaaaacttgtaggcgcgccgtttattaaggtggaggccacaaagtttacggaagtcggctatgtcggccgcgacgtggagtccatggtgcgcgacttggtcgagtcaagtgtccgtcttgtcaaagaagagcgagtcgcactcgtaaaagacgaagcgaaacagttggctgacaaacggcttatcgaacttcttgtcccttccatgaaaaaggaaaccaattataaaaatccgtttgaaatgctctttagccagccggataaagaggaggaggaagacggggaagaggaactgacccgtgccaatttaaaaagaaaaatggcggaaaagctaaagcaaggcgagctggaagagcgcaccgttacggttgaagtgacagaacaaaatcatggttttatggatttgtttcaaggcggggcgggtatggaacaaatgagcatgaatatgcaagagatgctatcaaacatgatgccgaagaaaaagaaaaaacgccgcatgacagtagccgaagcccgtggtgtactcgctgaagaagaagcacaaaaactaatcgatatggatgatgtcacacaggaagcgattacacgagcggaacagctcgggatcatctttatcgatgaaattgataaagtggctggaaaaaacgatcaaggggccaatgtttctcgagaaggtgtccaacgcgacattttgcctattgtagaaggttcgactgtcgtgacaaaatacggtgctgtgaaaacggaccatatcctttttattgcagcaggcgcttttcatatggccaaacctgcagatttaattccggaattgcaagggcgctttccaattagggtcgaactgcaaagtctttctgtcgatgattttgtccgcattttagtagaaccggacaacgcattgacaaagcaatatgaagcacttttgcagaccgaaggtatagaaatgaagttttcagacgaagctgttcgtaagattgcgacgattgcgagcgaagtgaaccaagaaacagaaaacatcggagcgcgtcgtttgcatacgttgctagaaaaattgcttgaagatttgtcctttgaagcagccgatattcacttggagacacttgaaatcactgaacagtatgtcgaagaaaaactaggttccattgcaaaaaaccgcgatttgagccaatttatattgtaatagcaaacaaaggagagatgtaggaatggatttacttacaagaacaagaaagattaatgaaatgctgcagaaaacaagcggacaacacgtcaatttccgcgaaatggcgatgacgttgcgtgaagcgattggctctaacgtctttgtcgttagccgccgtggtaaattgctcggtttctctattgaagaagagattgagaatgaccgcatgaaaaaaatgctcgacgaacgccagttcccagaagagtatacagatggcctatttaaaattgaggacacttctgccaatattgatgtagacagcgagtatacggcgtttcctgttgaaaaccgtgacatctttaaaaatggcttgacgacaattgtgccaattaaaggtggcggtcaacgtcttggcacgttgattctctcccgtttaaaccgctcttttagcgatgatgatttgatcttggctgaatatggtgcaacggttgtcggcatggaaattctccatgagaagacacaagaaattgaagaagaagcgcgcagcaaagctgttgtacaaatggcgatcagttcactgtcgtatagtgagctggaagcagttgaacatatttttgaggagcttgacggcagagaaggattgcttgtagcaagcaaaatcgctgaccgtgttggcattacccgttctgttatcgttaatgccttgcgtaaacttgaaagtgcaggtgtcatcgagtctcgttctttaggaatgaaaggcacttacattaaagtgcttaatgacaagtttctgttagaactagagcgcatgaaagaagactaagcccaattttataaagcaatcagactgctcgatagtctgggaaccacccgtcctccatcggacgggtggttttttgttttgctgatgtgctctttttcaactagaaagaaggacctagagtagggtgttgtttcaagtgttcagtcgatatgtaacgtcgataaagggaccaaattcctaaaaagtaacaaagttaggtagggaaaagagggagatatgttcgaaaagggcattaatgcccagttccagctaaaaactttctttccaataaactagtaaaaatgacaattgaaccaagagtctaaagtcctaaaaacagtgacattataacgtttatcgggactaaaatcactcctaatagtggtacattagacttaattatatataaatctcaaatgagcttagacaaacatctcaaaaactagtaaaactttatcagggctaaacatgggaaatagtgcttaatctttcctgtttttatgagaaaagacatgagtaaaaggagggagacagttgttcgttactagtacaattgcggcgcttgaagaaggcatacgctactcgtcgacgaaacaaaaagcgatctcaacaaatctagcaaatgtcgacacacctaattttaaagagaaaaccgtgtcttttgaccaagttttacaggctgtcggggaaaaaacgggacacttgcaagcgaagcggacagacgagcgccatttgtcttttccgcttcctgggaatggcgttgtttcattacgggaaaagggagagctatacaaccacaatgggaacagtgtcgacgttgataagcaaatgaccgaaatggcgaaaaatcaactttattacaatgcactcgttgaccgaattagtggaagctttcaatcgcttgaaacagcaattaaaggtggcaaataggaggaatggcatatgacgatgttttcaagcatgaacgtatctggatcaggactgacactacagcgattgcgaatggatgtagcagcaagcaacattgctaatgcagatacaacaagggccgagcgtgtaaatggcgaatggcagccttaccagcggcgaatggttgtccaaggaccgacgtcaatggggcgcttttcgtcagatctgcaaaaagcaacggccgagcttgatcagggagttgtagcaaaacaaattgtccgcgatcctacaccggccactcttgtttatgaccccgcccatcctgatgcaaatgaagatgggtatgtctcgaaaccaaatgttgagattgcaagagaaatggtcgacattacaagtgcaacgaggtcctatgaagcaaatgtcacagcgcttcaagctagcaaagggatggtcatgaaagcactggaaataggtcgttaaaggaggatgaggaaagatgacaattgaagcgatgcagccacttcttcaaccgctcgctacacaagctggcaaaacggaagtaaccagcaaaggcgccgattttaagtcggctttattgaatgctctccattcagtcaaccaagatcagcttgcttcaagtgaagcaacacaagcacttgttaaacaagaaccgattgacgtgcatgatgtcatgattgcggcgagcaaggcatcggtttcaatgcaagccgcgctagaagtacggaataaagcagtagaagcgtatcaggaaatgatgagaatgcaaatttaagccgcctgaaaggcgagatgcaagcggaggcgccatgaaggagaaagcgaagcaattcaagaaccaggtgcaaacgttttggacagagagcagtacgctgcgaaaaagtgcagttatttccgttgttttactacttttattagcgattgcactggctgcggctcttttattccgaacgaattatgcgcctttatatagccaattgacattggccgaggctggccaaatacaagaagcgctcgaacaacgaggggtggctgcccgcgtttcaaatgacggcaccaccatacacgtgcctgaggcggatgtagatcggttgaaagttgacctcgccgctgaggggctgcctaaaagcggcagcatcgattatgcgttttttcaaaaccaaatgggttttgggatgaccgataatgagtttaccgttatcgaacggtcccttatgcaaacggagcttgccgaattgataaggggcgtccaaggcgtcgagcaagcgaatgtcatcattacgctccctgaagaaagcgtctggctgaattcaggccaagaaagttcgactgctgctgtagtgttgcagttagagccggggtatacgctcgattcgtcgcaagtgaaagccttatatcatttaatatcaaaaagtgtacctaatttgcctattgaaaatattgtattatccgattcgcagttcaataactatacataccaggaagaggaaacaagtcctgccgcctcgttccaatcacagcgtgaaattaaacaagaaattgagtcggacttgaaacaaacgatcaatcaacttttaagtgcggtggttgggccagaaaatgcaatcgtatctgtcacggcagatatcgattttacccaagaacagcgaaccgaggatttggttgagccagttgacgaagaagaggtttctggactggcaatcagtgttgaacggattaacgaaatgtatgaaggaacaacaggcaatgaggaaggtgtcgctggtgtaggcgatgagattcccaattataccggcgcagcaggcggtggcgattctgaatcagagcggacggaagagcggattaattatgaagttaaccggatccacaaggaaatcatcgaaagcccttatgaaatccgcgatttaggaattcaagtaatggtcaacccgccagaagggatgcaagcattgccgcctcagcaaacggcagacatcacggctatgttagaaacgattattcgtacgacattgccagatgatggcgaggaagaaggagagcaggatgttggtgaccgtgtagtggtaacatcgatgccattcgcacaaacggaaacgggagaggcggaacagccgtcgtcagcaacgataccggtctggatttacgcagtagctgctgggctcgtcttgctaattatcatactagctgtcctgttataccggaaaagagaaccagctgacttagcagaagagcaagacgaggcggcagaaccagagccagagcaagaggatgagccacttatggagacggaagaaacagaagagagcaagcagatgcggcaattaaaccgacttgcaaaagaacaaccagaagacttttcaaagcttttgcggacgtggctttcagatgaatagcagaaaggagattggacgaaatgccgaaagcaaagctgacgggacggcaaaaagcagcgatattgctgatttcgctcgggcccgatacggcagcgcaagtgtataaacacttaactgaggatgagattgaactgctgtcgcttgaaatatccgcgatgcgaaaagtcgataaagatgttcaaaacaatgtcatgggcgaatttcattcgatggcgaaagcacaggagtacattgcccaaggcggtataggctttgcgaagacgattttagaaaaagcattaggagaagaagcggccgcctcgatgatccaacggctgacgtcaacgatccaagtaaggccatttgattttgcccgcaaaacggatgcaagccaaatattaaattttatccagcatgagcatccgcaaaccattgccgtaatcctatcgtacttgtcagccaagcaggcaggtcaaatcatctctgctttgccggaaacgatccagaccgatgtcgcaaggcgaatggcgctaatggacagctcctctccagaagtgatcgcgcaagtggaagcagttttggaagagaagctgtcgcaaacattgtcacaagactttacggaaacaggcggaattgaagcggtcgtagaagtgttgaatggcgttgaccgttcaacggaacggacgattcttgatgggctctatatccaagatcctgagttggcggaagaaatcaaaaagcggatgtttgtgtttgaagatattgtcacccttgaaaaacgggcgatccaaagagtcatccgcgatgtagacaacgatgatttgaagcttgccttgaaagttgcaagcgatgacgtgaaagaaatggtgtttgacaatatgtctcaacggatggctgaagcgtttaaagacgaaatggattacatgggtcctgtccgcttgcgtgatgtagaagaagcacaatcgcggattgtcgctaccatcaggcagctcgaagaaatgggcgaaattgtgattgcccgcacgaatggagatgacgtccttgtctaatgtgatccgttctactaagaatgtgagcattgcacgggaaattggcattaaacctttgtatcaacggacaagagtacgcgaaacaagacaagaacttgccaaagaagaagccgaattcgaacagatacaagaaaaagcagaagcaaaggcagcccaattgatcgaggaagcacaagcacaagcgacggcgattgaaaaaaagatggaaagcaaacaagcggagctagagcaacaatgggaaaaagcgcgcttgaaagcagaacaagaagggtatgatgctggctttacagcgggtgaaagccaagcaaaagcgatttacgagtcaacgatcgcggaagcgaagcaagtgttagaagaggcgcaggcggcggcagcattaaaagtagacaaagaacaaccgcttttgattgagcttgcctgtgccattgctgaaaaggtgattggtgtttctattgcagaagacccctacttacagaatatcgtgcgagccgctcttgctgaagtgcgtgaccatgcatttgttaaattgtatgtgccgccccattggtataaaaggctcgccgcttgtgtggacgagttgcaaggggccatccctgcctgtgaagattttcagcttataccagacgggcaactacaagacgaccactgttttatcgtcaccaatgctggaagaatggatgcttctcttccgactcagatcgagcagttaaaaaagcagcttcatgaggctgcgaggtgtggttcatttgcaaaagctcattgatcatgtgcacacactttctccctataagtggtatggacaagttcgccatgctgcggggttgacgattgaatcagccgggccgagggcatttatcggcgaactgtgctatatctgggctagcccagatcaaaaggggactaaagttagagctgaagtcgttggctttaaggatgaccgcattttgctcatgccgctagacgatacgcggcgaatagcccctgggagctatgtagaaggaacaggaaaaccgttaaatgtagcgtgtggaccaagtttgattggccaaattgtcaatggcgtcggtgaaccatttttgcaaagcgcagcattgggggatactgacgccaactattcgacggacaattcacctccaaacccgctagaaagaccgcgcatttccgaaattatgagtgttggtgtccgcgcaattgacgggctgttgacaatgggaaaagggcaaagagttggcatttttgctggcagcggtgtagggaagagcacactcatgtcgatgattgctaaacaatcagatgcagatgtgaatgtgattgctttaattggtgaacggggcagagaagtaaaagaatttgttgagcgcgacttaggagaggaagggcttaaaaagtctgttgttgtcgtcgcaacatcagaccagccagcactgttacgagtgaaaggagcgcaaacagccactgccattgctgaatacttccgcgacaagggcaagaatgtcaatttaatgatggattcggtcacccggtttgcaatggcacagcgcgaaattggcttggcaattggtgaaccaccgacgacaaaaggctaccccccttctgtttttgcgatgatgccaaagctgcttgaacggtcaggtacaaaccagtcaggctcgatcaccggtttatacaccgttcttgtagacggcgacgacatgaatgagcctattgcagatgccgtgcgaggaattcttgacggacactttgtattggacaggcaactcgccaatcgtgggcagtatcctgccgttaatgtgttaaaaagcgttagcaggctaatgaaagacttggtcgaaaacgatcatcttcatgcagcaaagctttttaggcaacgtttagccgattacgagcagtcagaagacttaatttcactcggtgcttataaacagggcagttccaaagacattgacgctgcaattcatgaccatccggctatgcttgactttcttaaacaagaagtcgaagaaagcgattcgtttgcagaaacgaaaacaaagcttatacaactttttaaacaggagtgacgcttgcaaatggcatttcaattttcgttacaaacagcgatggatgtatgcaagcaggaaaaagaagccgcccataagcaatacgaagtggctgttgacgcatttgaatgtgaggcaatggcgctgttccgtttgctaaagcaaaaagaagatgtgcaagcagcgaccgagaagatgctagttgaaaaagcatcggtttccgatttgcttattagccaggcgtgcttggacggactggagcagcaaattggaaaacaacagctgcgaaccgaccaggctagggctgatatgcttcaaaagaaagcgacgttccagcaacatgccgtttcgtataaacaatatgaacgattgaaagaaaagaaacgccttgaacaaaaacaagcagaaaaccgccgggagcaacaactgatggatgagttgtgcgtgacccggttcaaaaggaaatttgcctaaatgaacgagaaaccaacaaaaaaacgctgggctgtgatttttgcttttgccgttccgtttttggtcatcgtccttgctgctctgttttttatcggccctttgctagggttttcgccaatggacagcattaaaaatacactcgggtttaatacgaataaccaggcagaaaatgagtggcaaaaaaagtatgagcagttggaaggcgaactgcttgatctgcaaacgcagttgcaggagctctccaatgagcttgaagtgaaaaatgctgaactagcagaagcgcaaggacagcttgatgacatcaaggaaaacgaggatgaggcaatcgtcaatgtggaaactgaaaacatgcttgaagaaggcaacttgacagctgtattaaagacttatcaacaaatgacgccaaagcgtgcagctgcattgctcgatgaaatgaatgaagaagaagcttatcgccatgtggctgctatgaaagatcaactacgtggctcgattctcgcgaaaatgcctgaagaaaaggcggcccggtttttagaaaggcttgcgcaagaaggggggtaaacgcaaacgtgcacataacacaaatggtcaatgaaatcgcaacgtcctcacgaccgttaggccatgtgaaaggacaaagccaatcgttttctgatcttctaataaataaggcttcatcgtctgctgaggggcgaaacactctttttcttcctcttgaagaggagggggacaacgacgttgaaacgtcggtgccaaacgatgaacaagcaaatgaccctgttttaagtggggtccccgctgaaaatcaggcgaatccaaatcaaatgccaataggcgttgttgactttggccagcctagtgttgtgaatgaagaggggagtagcagcaggcctggtctagtggactcgacgggctgggatttaggtaaaaccacagcaggtgtttccgatgcagcattgactggggcaacatcgagtgaggaaacgggtgagccgttagagaaactggcaaaggagccggaagaaaaggacaatgctagtggtaaacctactttaagccaagaagaacataaagacatagctgttcgtgatcgtaaagctggcgacaaggaaccgtcaccccggcaagtcgcttctcctcctttacaagacataggtacagaaccgaccaagggagacaaccgagcatttcgtgataaaaatcaacaaatgtctcctaatcgttcggcgcctttgccgcaaggagacgacaaaatagagcccgaaaatagggcagagtcgctgaggcaggaacaaaaagtcgcgcctttaacaaaagagcaggcaacgccaagtgaggcgatgaaagccagcaaaaacgatgcagcggcgcaagtcgttttacgcgtgcaagacgagtcacctgttaggacaggaacagagcgggccccagtttttaaaaatgaaccaaacaagcttgctgaccatgaagaaaacggggtacatactgggcgaaatgaggcgacaacgttacccgatccttcgccagaagagaactttgtacaaacagactctaacaagcgaatcgttcatgaaaaggagccaagcactgcgccgcgcatcatagaaggacctaacaaacaaacgcctaacggcacaggaatggctagcggtcagatgggaatcgaaggaagcgttactgtggaagccacgaaactgccaagtggaaaaagtgcgctgcctcctatgctgactaagcagcttgaacgagtgctaaaggcggctgtgttaaagcaacatggagatggggcgttgcaattgacggttaagctgcatcctgaaacgctagggcgtttgcacgtacaactgctccattcaagccaagggctcgtcgtcaaactgcttgctgataaaaaagcaactgcagaaacgctagagcgcgctctccctggattaaggcaattgtttaaccaagaagccacgtttgaaattgggccaattgatgaagaaggggacgagcaaagcaatggtgatagtggacaggaaggcgggcggaagcaaccggaagaagaggttagcgaacaacggaagcagcattcattttcagattggatgagtcaagaacaaggagaaggagagggagcggatgacgcaagttgacccatcgttgtggctttcctcgtcacaaaaccaacagcggcaaccaaacaatgcacttggacaagacgcgtttttaaagctattgattacacaattgcaaaaccaagacccgagcaacccgatagaagatcgggagtttatcgcccaattagcaactttttcccagttggagcagctcacgaaactgaatagcacgatggaatacatgtactatgagcaaaaaagccagcaattgatggcgctaagcgagttaatcggcaagtcggttgaatggcttaatgaaaaagaaaaagttgagcaagcaacagtgactggagttaaatacagcgagtccggcgatttgctcgtacaaatcgatgatgacaagtggattgaggcaagcaaattaatttcaataattaaaccaacaacaaacgagtaaaggagacgatccgttatgattcgttccatgtattcaggtatctcaggtatgaaaggttttcaaacaaagctagatgttgtcggcaataacatcgctaacgttaatacacatggtttcaaaaaagggcgcgtcatgtttcaagatatggttagccagcaagtacaagggccaatggccgccactcctaaccgtggtggcgtcaatagtaagcaaatcggatcaggttcaatggttggcgcaattgacacggttcataccggaggaggcaaccaatatacggggcgtgaattggacttagcaataaatggcgatggctactttgctgttcaaattggagacgatacattttatacgcgtgctggaaatatttatttcgacaatgagggcaatgttgtcaacagctcaggcgcctatttgttagggccagacggcaacaggctgcaaatcgatccagcccttctagatgacatggagagcactaccgtaaacaaacaaggtgaaatcatcgtttcgattcagggccaagaaaaccctgtaacgttgcaacttggcatcgctaattttgccaatcctgaaggccttaatagcgctggcggatccctattcacagcaactcctgcttctggccctgccaacctagtcattccaggaacacaaggcactggcgacattcagtctggttatttagaaatgtcgaatgtggatctcgctgatgaattttcggaaatgatcgtcgcccagcgtggttttcaagctaactcccggatcattacgacttcagacgaaattttacaagagcttgtcaacttaaaacgataggtgactggcatgattccattaacgcgcttaaacgggcaacggttgttgttaaatttgttgttgatcgaaaaagtagaagcgttgcctgatacaacgatcacgcttgtaagtggaaaaaagctcgtcgttgccgatgacatggaacaagtcggccaagcgatcaacaaccgcatggccgaaatcggccttgttggaagctacaaaagggaggattaatcaggttgaaaaaaaaccgtgtaattggcgtagcgttcagcctcttgctcaccggagtcgtcatagttgcagggctctatatgcttggcattggcccatttgcccaaaacaaggcaagcggtgcgccaacaatagaggacattagtgagcgctcatttgatacagaagaaattacgaccaatttaaagtcaggggaattcatccgcgctcaatttcgaattgaactcgatcacaaagacacgcttgcggacatcgataaaagagggttccaagtgaataatgtcattttgctgacacttgcagaaatgtctgcggaggacttggtcggtgaagagggtctagccgagctgcaggaaacgatccagacaaaattaaacgaccatttagaacaaggcactgtcaaagctgtttatacgacagtgaaagtggtccaataacaaaaatgaggtgctctaatggctgatgtgctgtctcaaggtgagattgatgcgctcctttctgctttgacgactggagaaatggatgccgaagagttattaaagctagagtcagagaagaaagttcgggtttatgattttaaacgagcgctacgcttttcaaaagaccaaattcggaacttatcccgcatccatgaaaattacgcgcggttgttgacaaccaatttatcggccaagctccgttcgcttgtgcaaatccaagtagcctctgtcgaacaggttccatacgaagagtatgtccgcagcataccgacgatgacatttttaaatgtgattgaacctatacctttaaatggacgggtattaattgaaattaatcctaatatcgcctacgccatgtttgaccgtgtacttggcggacatgggatgagctttaataaaattgataatttgacagaaattgaaacgaaaattttatcagggctatttgaatcgatgctggcaagtttcgctgaagcttggacgactgtcattgaaatggaaccgatcaccgaaaatattgaagtgaatccccattttttgcagctcgtgtcaccgaacgaaacggttgtcgtcatttcgctgtcaacaagcattgccaatacgacagggcttatgacgatctgtttgccccatgtcgtattagaagaaatattgccgaaattaacgagccaccattggtttcaagaacagcgcggtgccctttcgacagaagatcaggcactgttaaacaaacaagtccggcagacgacacttgaagttgccgccgaacttgggcgttcaacaattacgattgaagaatttcttcgcctcggtaaaggggatgtcgttgccttaaaccagctaattgatgaaccacttgatgtgctcgtaggcggtgaaaagaaatttagcggccagccaggagtaaagagagaccggatggctttgcaagtgactgacgtattaggaggaacggatgatgaatgacaagccgctttcccaggaagaaataaacgaattgttaaaggggctccaggacggcgaagcttctgacgaggctgggcaaccagaagtccgtgaaggcgaatcccagccagaagaatcacaaacggagcccccggatattaacgagtttttaactcatatggagcaagatacgattggcgaaatcggcaatatttcctttggtagttcggcgactgcgttatcagcactgttgaatcaaaaagtcgaaattacgacaccggtggtatcagcagtcaaatcagacatgttgcgccagctttttccacggccgaacgtcattgtccatgttaaatacacagagggattcgaaggctcgaacttatttgtgattacgactgatgacgcagcgatcattgcagatctcatgcttggaggaaatggggaaaaccctgatccagaattgtcggagatgcatttaagtgcagtccaagaagcgatgaaccaaatgatgggttctgcctccacatcgatgtcgacattattcaatcgtcgtgtcgacatttcgccgccaaaagtggaagttattgaatttgatgagcagtcgcggacggagtatgtttccgatggcgaagatttgattgcgatttcgttttctcttcgtgtcggcgatctgattgattcaaagttaatgcaacttattagcgttcctttcagcaaagattacgcaaacgccttgcttggcggaggcaccaccgcagaaccgccagtgcaagaggcagaaccgttgcctgaacctgctccagccattggcgggcctggggatggcacaagtgctgagcgagtcaaccagcatattggccaaaggggaaaagatgctgagcaagttggagaaaaagcggtgttctctaattttgagacaacaaagccagacgaagcagaaatgcaaaacttagacatgctcttagacataccgctggaagttaaagtggaattggggcgtacgaaaaaaacgatacgcgaaatcttgtcgattgcgcaaggatcgattattgaactggataagttggcaggggagccggtcgatgtgcttattaatgacaagctgattgccaaaggggaagtagtcgtgattgacgaaaactttggcgtacggattacagacattgttagcaaaaaagaccgtcttacccacttgcgttaacttttatctatcttaagaaatcaacatatagaaagagggcttttcatgtcaaaaaaagtattggttgttgatgatgcggcatttatgcgcatgatgcttaaagatattttaacgaagaacggctataacgtagttggagaagccaatgatggcaaccaagcagttgaaaaatataaggaactttcccctgacttagtgacaatggatattacgatgccggaaaaagacggaatttcggcgttaaaagagattaaacagtatgatccgagcgccaaagtgattatgtgctcagcgatgggccaacaagcgatggtcattgacgcaatccaagaaggcgcaaaagattttatcgtaaaaccatttcaggcggatcgagtgatcgatgcgatttctaaagcacttagttaacgtttcgactatcatcgcgctggccctgctactcgttggtttagcagggttcagtcccgctgaagccaaggactgtagcgtcaatgacgtgctcgagaacggcgaatgcgatgaagagttggccaaggaagaaggaaaagatgctgaagcggaagcggaagcggaagcgcttatggaaccgccttggctcagctttgtcaagatgatcgcggcgcttattgtggtcattgctctgttatatggactgttgcgttttgtgaacaaacgggcgaaaacatttcaagaaacaaaggcgcttcatctcgtctctggcgtttctcttggccaaaacaaatccgttcagttggttaaagtcggggaaacattattggttgtgggcgtcggtgatcaagtgcaattgttaaaagaaatcgccgatccagacgaaataacggctattcttgccaaacagcaagctggggatgaggagccatttctcggtcatgctttaggaagcatgaaagcggcgttctcgaaaaagacaggcgctgcgccaccgacgttccaacacattttaagggacaagcttgcggcttccaagcaagaactgcaagacacacgccaggcatttatagaaaagaggaaggaccgatgattttacaacatgtagtagctgcttttgcctcgtttgattttacgaatggcgagacaatggcaacaacggtccaaattgccttattgctaacggtgctgacgattgcgccaggaattttgattatgatgacatgcttcacccgcatcatcattgtgctagcctttgtacgacaagggctcgcaactcaatcgacgccaccaaaccaagtgttaattgggcttgcgttgtttatcaccgcctttattatggcccctgtcattcaagaagtgtatgagacagcatatgtacccttagcggatggggagtattccagcgaggaagcatttaaggcagccgttgtaccaattaaagaatttatgagcgcccatacaagggaaaaggatttggcgttgtttatggggtatggcggatatgacaggcctgcttcaatagatgacgtgccgttgacggcgcttgtgcctgcttttgcgattagcgagttaaaaacggcctttcaaatcggctttttgatttttatcccttttcttgtgatcgatatgattgttgctagtgtattaatgtcgatggggatgatgatgctgcctcctgtcatgatcgctctgccgtttaaagtgcttttgttcgtgttagtagatggctggtatttagtcgttcaaagcttgctgatcagctatcaatagcgctgggaacaatcgcaaaggctctcgtattctagtggggctggcagttgcaggaatgaaccaatgagattaccgattgaataggagtgagccgctatgagtttagaaatggttacacacttagcccaaagcggtgtatggaccgtactgatcgttgctggtccgcttttggttgtagcgttggcgctcggtttgattgtgagtattttccaagcgacgacgcaaatccaggagcaaacattagcatttatccctaaaattgctggcgtgctgcttgcgctcgttttctttggcccatggatgttgtcgcaactgactgagatggcgtacagcatttacaacaatttgtataggtttattggctgatggatgaatggctaacgctttatccggcttttttacttatatttattcgcgtcagctcttttttcgtcgtgctgccgctgttcaaccacagaacggtgcctgctccgctcaagctcggactatcggcgtttttggccgctactctcgcagtgtctcttgacgtgcctgagttagcgctagatttgccatttttgctacttgccttaaaggaattcgcgattggcattgctgctggactgatcgcttcgatgatcctctatgctgtgcaagttgcgggcggtgtgattgattttcatttagggtttatgcttgccaatgtcgttgacccgcaaactggggcgcaaagcccgttgacaggaagttatttataccttttcgcgatgttatatttgctaattatagacggacaccatttgcttcttgatggcgtcatttacagttatcagtttgtccctcttgaccaactggtacttccgtttggcagcgggcatgtcatggagcatgtgacgcaagtgatggtgatgctgtttgcgatggcggtgtcgatggctatgcctgtagctggtgcgctctttttagtggatgtggccttaggcattatctcaagaaccgttccgcaaatgaatgtgtttgtcgtcgggattccgattaagatgttggcaggttttatcgtgtttgctatctatatcggcgtcttttttatgagcgtgaacgttttatttgaagaattattgcttgcgatgaggcgtctgctagaagggctaggtggtggtccgcaatgacaaggctacctatggatctgcaatggtttgcagaggagaagacagaaaaagcgacgcctaagaaaaggcaggatacccgtaaaaaagggcaagtgccaaagagtcaggacgtcaataccgcttttatgctatttgccgcctttttgcttctttccctctttgctgggccaaggctgtttgctgctttgaaggaaatgatggctgatgtgtttcagcgctttctatcattaccgctgacagctgaaaatattgcggcgttgtttaacgaattgacaattgagatgggaatggctgctttgccgattatggcgctgaccgttcttgctggcgcatttgctagcttcgtgcaagtcggttctttatttacgcccgagccaatgaaactgaagctggaaaaattagatccgattaaaggggcgaagcgaatattttcgacaagggcactcgtcgaacttggcaaatcgatgttaaagattgtctttattggcgcagccgtggcctttgtgatttatgcaaatataggcgatgtcttgcttttatcacaaaaaagtgttgaggtcggcgctgcttcgattggccatttaacagtgacaatgggactgtttgcggcggtattgttaatggtcctcgctatcccagattacctttaccagcgctatgaccatgaaaagcaaatccgcatgtcaaaaaaagatattcgggatgaacataaaacgatggaaggtgacccgaaaattagggcgcgccggaaacaacggcaattggaaatgtcgatgaacaggatcatgcaagaagtgccaaaagccgatgttgtcattacgaacccgacccattacgcggtagcgcttcgctacgaccaagaacaagcagatgcgccaattgttgttgctaaaggcgttgattatatggctgaacggattaaaacggtcgctaaaaaacacgatgttccacttgttgaaaacgttgcgttagcaagggcgatgtatgcgtctgttgaactgatgcagccaatccacgaagacatgttccaagctgttgccgaagtacttgcctacgtgtacaggttaaagaaaaacaaacattaaacatgaaaaaggagggagatgcgatgaaagcgagggatttaacggttttagcaggcgtgattttaatcattgtcatgctgattatcccacttccgccttttttgctcgatgtcttaattatattcaatatttcactgtcattactcattttgctagtagccatcagcacaaaagatgcccttgacttttcaatttttccaacgatgctgttgctcgttacactgtttcgcttaggattaagcgtgtcgacgacacgttcgattctcggcaatgcggaagcagggaatgtgattgatacgtttgggagttttgtcattggcggcaatgctgtagttgggtttatcgtctttttaatcctcatcgttatccagtttattgtcattacaaaaggggcagagcgtgtttcggaagtcggtgcccgctttacgcttgatgccatgccaggaaaacaaatgagcattgatgcggatttgaatgctgggctcatttctgaccgtgaggcgaaacaacgccgggaaaaaattgagcacgaggctgacttttatggttcgatggacggtgccagcaagtttgtaaaaggcgatgctattgctagcatcattattgtcatcattaatatgctcggcggcctcatgatcggcatgatgcaaatgggcatggacatgaacacggcggccagtacatacacgcttctaactgtcggggacggcttggttacgcaaataccggcattgcttatttctacagcgacaggcgtcattgttacaaaagccgcttcagaaggaaacttaagcaccgatttgtcgaggcaaattctcgcttacccgaagcttctttatgtaacagcggccactattttactgcttggtttagcaacgccgattacgaaagttgtcacgttttcgatcgcagggttgctcgcttttgcaggctaccgactgtcaaaagcaagtttggcaaaagcgaatttcgaagaagcccttttagaagaagcaccacctgaagagccgtctggccctgaaagcgtcgtccaacttttgcaaatggacccaattgaatttgagtttggctacggcttgattccgttagcagatgccaatcaagggggagacttgctcgatcgcgttgtgatgattcgcaagcaaatggcccttgaacttggttctgtcatcccggttatacggatccgcgataacatttctcttgagccaaacagttatacgatcaaagttaaaggcgctgtagttgcaaaaggggaagtgctgctcgaccattacatggctatgagcacaggggaacaagatgactcgattgtcggcattgagacgattgaacctgcatttgggctgcctgctttatgggtagacgaagacatgcgcgaccgcgctgaaatggccggttatacagtcgtcgatccgccaacagtcatttcgacacatttaacggaagtgttaaaagcacatgcctatgagctgcttgggcgcgaagaaacgaagcagcttatcgaccatctgaaagaatcctatccgacgctcgtcgaagaagtaacgccgaacccgctcacaacgggcgatattcaaaaagtgctccgcaatttgttgcgcgaacaattatcgattcggaatttgcctgttatttttgaagcgctcgctgattatggcccgcttacaaaagacatgaatgtcgtcacggagtatgtgcgccaagctttatcacggcaaattacaacacaattgacaaacggcggaaacgaattattcgtcatcacgttagccgctgctgttgaaaagaaaattgccgatgctattggccaaaatgagaatggcagctttttggcactcgcgcctgctgattcacaagccattttacaaaacacggccaaggaagtacaaaaagtggctgaacttggcaggcaggctgtgattttatgttcgccagctgtacggatgcatatgcgccaattaatcgagcgccatttgccctatgttcccgtcgtgtcttataacgaattggaaccggatgtcgaagtccaaagcgtaggagtggttaatgccgaatgaacgtaaaacgatttgtagccccgacgctagaagatgcggcaaaagacatccgcaagcagttgggcaaggatgctgtcatattgcatgtaaaagaagtggtgacaggaggcctatttggtttttttggcaaaaagcaagttcaagtgaccgctggcattgatggaccgagtcatcgtaacagtgttagccgcgacggtgatgataagcaatcaccgcttttaaaagaagcaaaccgccatttgcaacagctgggcgtgtcaaaccgtgttcttaaaaatttgcagttgacagcgcaaatggcagacaagcaaggcaacgcccggacgaaagaagagttgcttatgcatacgtttcgcgccagtttgcagctgcaaccattcgtgcaaaaacggcaacaaacactcattgtcgctgggccaactggggtaggaaaaacaacaaccatcgctaagcttgctgcaaaagccatgtttgaggaaaacaaaacggtttcttttatcacgtttgatacgtatcggattgccgcagtcgaacagttaaaaacatatgctcatattctcgattgccctatttatacagcatacaatgaatcagaactcattgatttgtgcggccgtcaaacggctgatcttgtcttagttgacacagctgggcgcaattatttgcatgagcaaatgcctgttgagctcgttgagtatatacggcagagcgcgtcatgcgacttagtggttgcccttagtttggctgctaaagcagaagatgcccggcatatgcttagccgttttccaaaagagcttgtcaatggcctgatcttaacgaagttggatgaaacagcttcacttggaacactttgtgagcttttgtacagcgaggcgattccagttgcttgtgtgacgactggacaaaatgtgccagaagacatttgctggcctgataaagaacaattgctgaagtggcttaccgggggtgtctgatggatcaagcagaaggcttgcgtatgcttgcaagcaggaaaacaaaagcatttgaaatccagctttcaaacgcgcaagaaacaatgatgatagaagaagtttgtcaagcgctcgatcgctacgggttccaagcggctattatcgcaaccgacgccgcaaaacaactgttttcagcccagaaacaagaccatctatttactcgagaatcgagtaaaacgctgtctgctgccaatgttcaagtgctgttttacatccggacagcgggggagaaaaaacaattgcgccaagatgttcctttgttgttgtttacagtggccgataaagaggcgcttcttgccaactatcagtttgtgaaacaagaaatgcctcgttctgttttgctccttggattgtcacaaggagattcagagaaagcgaagcgcgctgcttacaatatggcgcatacgattacgacatttttagaaaagcggacaacaatcctcggtgttattgaaaacgggtctcgcgaagcgtacgttgatagcatttacgagagtgtaagcgtgctcgtaaaggaatttttgttgcaatggtgaccgtagcgattgtgagcccttctttgtttaagcagcaatttctacaaacggcgctacgtcaagtagagggaattgaggcaaatgctgctttttcaaactgggaagaggcgattgtgacggttgatgcatttttatatgcgccttgtgaggaatgggagcatatggacgtcgccggggtgcctcgccatacagtgtttgtactagaacggcatcagcaagtggttgacagcgaacgaaccgtcttctggcaaacagcaaatgccaaagcgctaactaaagaccttgccgccaaactgttgccatgtggcaaacgggacgaagctccattgcagccgttaggggaagtagttgccattggtgcatcatcaggcggccctcttgctctcacccatgtgctgacaaagctgccctctgacttttcagctccaatcgtcattgcccagcatatgccagcaggttttacgaaatcgctggccgctcggcttgaccgcttatgtcggattcacgtcaaagaagcatcacatggggaagcgctacttgcaggtactgcttatattgccccaggaggcgcccagttggaactaaataaacgtggcgctcgcctgtacgcccacatttcacctgctggcaaacatgatttgtaccatcctagtgtgtcgctgcttttccagtctaccattgcgtgtacgacgaaaacgcttgttgtgttaacgggcatgggaaatgatggttcgaaagtattggaaatggttaagcaaagcggcggttgtgaaatcttagctgaatcggaaaaatcggcggcgatttttggaatgcctaaggctgcgattgcgagcaatcaagtcgacactgtcatggacaaggatgagattgggcgatacttagctaaaaaagataaacgggaagggggattttatgcgtaatcgattagacggaatgaaggaagtggccaatatcggcactggctacgcggcgacagctctgtccagcctacttggtgccaatgtcgtcatggacgttccagctgcacgctacctatgcatggctgaactgccccgcttccgttttgcggagggtgaagaaattgctgctgtctatgccccccttggcggcgagcttagcggcggaatgttctttatggcgaccacaaaagcagcagctgctttttccgcttatttgcttgaagagaagctcaagctaaagccacatgtatttgcggaaagcgagctcgcccagtcagcctttcaagaagtaggcaacctgttgatcggcgcttacttgactgctttatcaaaactgacagacttaaaatgctacccgcttgtgacagagctttccattgacttagcaagcgctgttctcgcagaaggagcgctacatttaatcgatgacgaagaatgtattgtgatggaaacggacatttgccttccgcattcgacgcagccccttgatggtttattgctattcatacccgataaaaacgcgagtgtcaccttaacgcaggcgttggaggctagctgccatgactaagggcgaaaccatctcaatcggagagtggaaaattgtcaaaggcgagggtgtcttacggacgtgcggactaggctcttgtatcggcattgtcctgtatgatcaggagcgagtcattgctggcatggtccatgtgatgctccctgattcgacgaaggcgcgaaaaggggcgaatccatggcgttatgcggatacggccatcgcctccttgcaggcggagttaaaaaagcaaggcgctaggaaactttgcgcaaaaatggcaggaggggcacaaatgtttaagcacgcagtgaagcgtgaatttatgcaaatcggcgagcgcaacgcggcggctgcaagagagacactcgcgcgcttaggcatcacacttgttgcagaagacataggtggaacgaagggacggacgattcaatacgacgtcaaaacaggcgaattggccgtccgtacggtccatcacgggcaaatgatactttgaaaggggagtgcggctttatggcaaatgctgcagagttatggaaacaatgggatgacgaacattcagaagtagctgctgaagcgttgatcgaacactatatgccgctagttgcttaccacgtgcaacggatttcgaatggcttgccgtcatcgatttcaaaagatgaactgaaaagccacgcgttaagcggcctgctagatgcaattgccaagtttgattccaagcgagcgctaaaatttgatacatatgcatcgtttcgaatccggggagcgattatcgacgggctccgcaaagaagaccgcctgccacggacaatccgtgataaagtaaaaaagttggaacaaatcacggaacaactagaacaggagaaaggtcggtctgttcttcctggcgaagttgccgctgcaatgggtttgccagaaaaagagatcgaagcattaaaacgggaacaatttgccagccatacgctttccttggacgacgtcatgcatatgaacgaccacttggaccctagcgctgttgcttaccaatttgaagatgaacaagcgattatgcctgatgataaattagtcgaagaagatacacggaaagaattagcagagatgataaaagagctaggacgcaatgaacagcttgtcatccaacttagctattacgaagagttgtcattgacggaaatcgggcgcattttaaatttgtcgacttcacgcatctcgcaaatccatgcccgggcaattgccaaactgcggaaaggcttgcaaaagaaagaatttgtccgttaaagggggagagcaattgacggaaatcttagtatttgcccttttgttactgtgcggctatttgtttatgaaacaggttgcccttgaaagcaaagtaaaagcgcttcaagaggggcatgtagataaaagcgaactagaagaagcgcttgaacaatttttagctgaagtaaaagaaagcaacgaccagctacttgcagtgttagccgacagcagctacgaacaagacgttgacacctatcaagcgaaagacagggaacagccaacattcactaatcaagcgaaaggcggcccaggtgttaagtctgttaatctagacaaggacgttaaatatcgagaacggaccagtcaagtcaaagatgggaaacttgtgaatcaaggcaaagacgataacgatgaagaacaggcgagccgaggcaagcatgatccagatgtgaagcttgctgatcaggctaaagccgataaacaggagaaccttgttcgtcaaggccaaagcggtcaatacgcgagacttgtcaatcaaggggatagtggccgacggaataaatacgctgatcaggcgcaagacgatcaacgggcgcacctcgaaaatcaagcggattacaatcaacgtcacagcgatgatacccccgctaatcgtagtatcgttgaccacggtaaggaagaaaacgacaaatacagcaagcacaacgatcataacgacaataaatacggcaacggccaagacagcgggctgaagtccgttgaagataaagaggaatttgcccattcagctacgtacagccaagtattttcgctaaagaagcaagggctggctgtggaagaaattgcccgtgacttggggatcggtgtaacggaagtgagcttgctgcttcgcttccatgaaaaaaatgatgaaaatccgcatgtatccagttgcagggaaccggacaatatggtatagtaattgacggtgttaaatacacacgccttggattttggcgaaggtgctcaggcaatgcgctgagtgtcgtcaaaaaatgaagagtgcggaggaaactaaaaccaacctaaggaggtgttcgatgtggcagtaatctccatgaagcaattgcttgaagcaggtgtccactttggccatcaaacacgccgctggaaccctaaaatggatcgctacatcttcacagaaagaaacggaatttacattattgacttgcaaaaaacggtcaaaaaagtcgaaacagcgtacaactttgttcgcgatcttgcggctgacggagggaaaatcctttttgtcggcacgaaaaaacaagcgcaagattctgttcgcgacgaagcaatccgctgcggcatgtactacattaaccaacgctggcttggcggaacgcttacaaactttgagacgattcaaaagcggattacgcgcttgaaaaaccttgaaaaaatgcaagaagacggcacttttgatgtgcttccaaagaaagaagtcatcttgctgaaaaaagaaatggaccgtctagaaaaattcttaggcggaattaaagacatgaacggcgtgccggatgcgctgtttgttatcgatcctcgtaaagagcggattgcaattgccgaagcgcataaattaaacattccaattgtagcgattgtcgatacaaactgtgatcctgacgaaatcgattacgttatccctggtaacgatgatgccatccgcgctgtgaaactactaactggaaaaatggctgacgctgtgattgaggcgacagctggtgaatcagaagaagaagtcgacgttgaagaagaaacaacaacagcgtaaatgacggactccaaaaagggtggtaaagggagatgaaccctttacttccctttttttgtggaaaaagtgaaaacacgtactgaaggaggcaatacttaatggcagtaacagctagtatggtaaaagaactgcgcgaaaaaactggcgcaggcatgatggattgtaaaaaagcgcttgtcgaagtagacggagacatggaaaaagcaattgattatcttcgtgaaaaaggcattgcgaaagcagagaaaaaagcagaccgtgttgctgcggaaggccttgcttctgttgtgacagaaggaaacaaagccgttattcttgaagtcaactctgaaacggatttcgttgccaaaaacgagaatttccaagcgcttgtaacagaattggctgagcacattttggcagaagagcctgctgacgtagaggcagctcttgcgcaaccattcaaaggcggaagcgaaacggtgcaagatcacattaatacggcaattgctaaaatcggcgagaagctttcattgcgccgctttacggttgtggaaaaagaagacgctgacgtgtttggctcttaccttcatatgggtggccgcattggcgttctaacggtcattggcagctcttccgaccaagagttggcgaaagacattgctatgcacgtagcagcgatcaacccgacttacgtttcacgcgatgaagtgacaaaagacgttgttgaccgtgagcgggacgtgttaaagcaacaagcccttaacgaaggcaagcctgaaaacattgttgaaaaaatggtcgaaggccgcctaagcaagttctttgaacaagtttgcttgctagaccagccgtttgttaaagatggcgaccaaaaagtcggcaaatatgtgaagagcaaacaagcttctgttaaatcgtttgtccgctatgaagttggcgaaggcattgaaaaacgcgaagacaactttgcggaagaagttatgtcgcaagtgaaaaagtaaatcgatagagaacgtgggaaggggacactgcgagaagttgtgtcccttttttcaaagactgttttttggaagtcatggataatggaggttagataagcgtgtataatcgtgtcgttttaaaattaagcggagaagcgttagcaggagaacaaggctatggcattgatccaactgtcatccaatcgattgctaagcaaattaaagagattactgaattgaacattgaagtggccgtcgtcgttggtgccggcaatatttggcgcggcatggctggaagcgctcaagggatggatcgggcaacagctgactatatggggatgcttgctacagttatgaattcccttgctttgcaagacagcctcgaagcaattggcgtcgaatcacgtgtgcaaacgtcgattgaaatgcggcaagtagcagaaccttacatacgccgcaaagcgattcgccatttacaaaaaaaacgtgttgtgattttcgcagcaggaacaggcaccccgtatttctcaacagacactaccgccgctctacgggcagctgaaattgaagcagaagtgattttaatggcgaaaaacaacgtcgatggcgtctacaacgcagatccgcgcgtggacgacaaggcgcaaaaatttgacacgattacgtacatggatgtccttaaagacggattgcaagtcatggattcgacggcgtcgtctttatgtatggacaacgacattccgcttatcgtattctcaattatggaagaaggaaacattaaacgcgccgtgttaggcgaaaaaatcggaacgactgtaagggggaaataaccaatgacaaaggaaatcaaggcagatgcaaaaacacggatggacaaagccattgacgtgctgtcacgtgaattagcgaaattgcgtgcaggccgtgctaacccagctttgctcgaccgcgtaacggtagaatattatggagcgcaaacgccgctcaaccagcttgcttcagtcacagtaccagaagcgcggctattgcttattactccgtatgacaagacggctgttgcttcaattgagaaggccattttgaaatcggatttaggccttacgccatccaatgatggtcaagtcattcgcattgcgattccgccacttacggaagaacgccggaaagaccttgtgcgattggttagcaaaaccgctgaagaatcaaaagttgctgtccgcaacattcgccgtgatgccaatgatgaattgaaaaagctacaaaaagatggagaaatgacggaggatgaacttcgcagcgccactgacgatattcaaaaactgactgacacgtacgttacaaaaatcgatgaaaaagcaaaacagaaagaacaagaaatcatggaagtgtaacacgtttatgtgtatgatgaagagtagtaggagaccctcttaagcaagggggttttttacacttttccagctggatgcaggctggcctagagcgccagcgagatggagggcgtaaaatgcttgagagattttcaaaatggaggcaagcctttacggatacagaagatgaggagcctacatcaatagatccgcaaaatataccgaggcatgtcgccattattatggatggaaatggccgttgggccaaagagaaagggctaccgcgtattgctgggcatagggaaggcatgaagacggttaataagattgttcgtgctgccaataccctcaatattgaaatattgacgctttatgctttttcaacagaaaactggaaacgcccgaaagcggaggtcgaatttctgctaaaattgccagaacgctatttgaaaagcgaattgccgacgctaatagaggaaaatgtgcaagtgcgtttaatgggttcaaaggacggtttgccttcgtatacactccatgcagtggatgaagcaattgaaaagacaaagcataatacgggactgattttaaattttgctttaaactatggaagcaggttcgaacttacgagtgccatgcaacaaattgccaaaaaggtacagcaaggcgagttgatgccagagcacattacagaagaaacaattagcgcccacttaatgagcaaccatttgcgtgatccagacttgcttattcgcacgagcggggagttgcggctaagcaactttatgttatggcagatcgcatacagcgaatttttgtttatggatgtgtattggccaaactttactgagcaccacttctataaagcggtcttaacgtatcagaatagggggcggcgctatggcggcgtgtaggaaggggatgtgtaagtgaagacacgagtagttacaggcttatttattggcgccgtcatcttggcgatgatcgcacttggcggctggtggtttacgacttttgttagcttgatggccaccatcgctatggttgagctattaagaatgaaaaaaattagcgctctttctttgcgtggcatcgtcggcctcgtttcaatgtggttgttgctcattcctgacacgctttttcatagcgccattcccctcaatgtgacaaaagtagagctgttcctatttttaatcttaggtttattattgctgacagtattgacaaaaaacaaatttacatttgatgaagttggttttgtgatcgtatcaagcgtctatattggctttggcttccattacttaattttaacgagagcgattccagatgtaggcgtatggcttgtcctatttgtcattgtattgatttggacaaccgattcaggggcttactttgtcggaaaagcgatcggcaagaacaaattgtggccagatattagcccaaataaaacgattgaaggttcggtcggtgggattgtccttgctgttgtcgtcggcacgattttttatatgatccatccattttttagctcatacataattgcgctttgcatcatgcttgttacggccgtgtttggccaaatgggcgatcttgttgagtcagccttaaaacggcattatgctgtaaaagattcaggcaatgtcctgccggggcatggcggcatccttgaccggttcgacagcttgatttatgttatgccgattctccatttgcttcaacttttgtaagccgaaaaacgagctatcgaactaactgtttagcaaacatgaatttttcataagggaggcgagtatagtgaaacaaatcagtttgcttggatcgacagggtcgatcggcacacagacacttgacgtgatccgtgattatccagatcaatttacgctttcggcgctcgcgtgcggcacaaacttagagttatgccgcaaccaaataaaggagttccaaccaaaactcgtctcagtacaacgcccagaagacgcacaaacgctagcaggggaattcggtgattctattgaattcttatatggagaagaaggcttaaaagaagtggcgcgttatagcgaatctgacatcgtcgtaacagccattactggttcgatcgggctgttgccgacgctcagtgcgatcaaggcgaaaaaagcagtcgccattgccaataaagaaacacttgtcagtgcgggccaccttgttgtcagtgcggcaaaggaaaatgatgtgccgctcattcctgtggacagcgagcattctgcgattttccaagcgctgaatggcgaaccaaagaaagcggtcgaccgtttgattctgactgcttctggcggcagttttcgcgacaagagccgggcggagctcgatggcgtgacagtcgaacaagcattggcgcacccgaattggtccatgggggcgaaagtgacgatcgattctgctacaatgatgaataaaggcttggaagtgattgaggcgaaatggctgtttggtttggattatgaccaaatcgatgtgttgatccacaaagagagcatcatccactccatggttgaatatgtagaccgcagcgtcattgcccagctaggcactcccgacatgcgcgtcccaatccaatatgccttaacgtatccagagcgctttgcccgcccgaaacatgaacgtttagatttagcggagcttggcaaactccacttcgaaaaaatggatatggagcgtttccggtgcatgaaactcgcctacgaagcagggcgcgctggtggcacaatgacaacggtgcttaacgcagccaatgaagtagctgtatgccgctttttgcaaggcgagatcactttcttggaaatcgagcgcatcattgaagaggcactaagtgcccattcgccgattgcgcatccatcgctcgaagagatccaagctgtcgatgcttcaatccgcaaacagctccaagcataacaaaccgagaggcggtatcgtttttgaatacattacttgcttttattgcgatatttagtgtgcttgtctttgtccacgaatggggccatctctactttgccaaaaaagcggggattctttgctatgaatttgccattggcatggggccaaaactgtttgcctttgagcgaaatgacacgatttataccattcgtttattgccgattggcggttatgttcgcatggcaggcgaagagcctgagcagccaacgatccggccaggctatgaaattggactggtacttgacgagaaagataccgttaaggaactaatcgtcaacaacaagtcaaaacatccagaagcacaagtcgtgcaagtggaacggattgatttggtccatgacttgtttgtggaaacgattgacgaagacactggcgaacttgttcgttatccaattgatgaaaaagcgttcatcgttcaagatgaagtggcgcaaattatcgctccatggaaacgccaatttggctcaaaaccactgccaaaaagggcgatggcgatctttgccgggccgttgatgaatttcatacttggctttgtgattttactcggcttaagtttgtaccaaggcgtgactcttagttcagaaattgttataaatggggagaactctcccgcagaagcagctggtctccaagacggcgacgttattacagcggtcaatggtgtagaagtcgactcttggaaagaaatgacaacagaagtcaaaaaatatcctggtgaagaagtgagcattgattatgagcgcaatggagaagcgctgcagacaaatgccactcttagccaagtcgaagtgatgcctgatgagtacgaaggctttttaggcgtgagtggtgtaccggagttttccttgcttggttctttacagtatgcaggaaatgaatttataaacatggctacatctatttttgatacgcttggtttaattttcaccggtcagttttcccttgattatatttcaggtcctgtcggcatttatgatattacagaccaagccgtttccttgggtatccaaactgttatattctttgctgcgctgttaagcattaatttaggcgtcatcaacttaatgccaattcctgcccttgacggcggacggctcatgtttttagcgtatgaggggatccgcggcaagcctgtttcgcctgaaaaagaaggcgcgattcagtttatcggtttcgccctcgtgatgttgttgatgattgtagtgacatggaacgatataagtaagctgttttcataatgagacaattgcataagaaagggacgtgtgtcacttgagacaatctacttacttagccccgacaatgcgggatgtgcctgcagacgcagaggcgattagccaccagctcatgctgcgcgcaggcatgatgcggcaaattgccgcaggcgtttatgcgtacttgccgctagcaaagcggacaatcgcgaaaattgaagcgatcatccgcgaagaattagatgccattggcgcccaagaattgacgttgccgagtttgcaccctgctgaactttggcaagcttctggccgttgggaggcgatgggtgacgagttagtgcgcttaaaggatcgccataaccgcgattttgccctcggcccaacacatgaggaagtcatcacttctttaattaaagatggcattgcttcttataaaaaactgcctctttgcgtctaccaagttcagacaaagtttcgcgatgagcgccggccacgtttcggtttgctccgtgggcgtgagtttatcatgaaagatgcctattcgttccacgactcgccggaaagcctggatgaagcatactggcaaatgcatggcgcctatagccgcatttttacgcgagttggcctcgagtttcggcccgtgattgctgattctggggcgatgggtggcaaagatacgcacgaatttatggcgcttgctagcgtaggggaagatactgtcgtttattccgatggatctgattacgcagcgaacttggaaatggcaaaagcggcgctgccagaggcgccaagtgtacaagcacatggcttgcttgaaaagagagcaacgccggaagcaaaaacggtcgacgaagccgctgaagcactaggttttgatgccgatgacatttttaaagcgcttgttgttgttgtcgatgacgtgctatccctttttatcttgcgtggcaacgatgagcttaatgaagtcaaagcattgcatgaacttggcgcaaaaacgttgcgcatggcgagtgaagaagaagtcgttgccgctttcggcgcgactcctggatcgattggtcctgtaggcgtaaaggatgtgccgatttatgccgactatcggattcgcagcatggagcgcattgcgtgcggagccaatgaaacaggctatcactatgtaaatgtcggcccaggccgcgattatgaagtgaccgcttataaagatttgcgcactgtgcgcgaaggcgatccgtccccagacggcaaagggacattgcgctttgctgaaggaattgaaatcgggcaaatctttaagctcggtacccgttactctgaatccctcgatgcgaaatatttagatggccaaggaaaagcacagccttttctaatgggctgttatggtatcggcgtatcgcggacgcttgccgctgtgattgaacagcatcatgacgaggctggcattgtttggccgaaggcagtggcgccgttcgacgtccacttattagcgttaaatgtgaaaaatgaagaccagaaaacacttgctgaacagctatacagcgacattcgccaagctggtatcgacgtattgtatgatgatcgaccagaacgggcaggcgttaaatttaaagacgctgacttaattggcttgccagtacgggtagccgttggcaaacgggccggagaaggcatcatcgaagtgaaagtccgcaaaacgggcgaacagcttgagttgacagctagtgagctagttcgttggcttaacgattttttacgtgaataatgcggaatgcaggctggctagtcgtcagcctgtttacgctttagcaaggagtgaaacaaatgagccaagcgaaagagacgagaaaagagcgccttcaactattgcttgaccagctgcaaattccagatgacggccgtcctcattttcaagacggctatattgaaaaactagcaatctcaaaagaacagaaaatctggcattttttcattcgattagaacgattgctgccagccgaatggtgcgaactgtttaaagggcgtcttgcccagacgtttcgagacattgccaatgcacgttgctcatttgcatatgccaacagcgagacggatgaaacagtatggcgcagctattggcctcttatcgccaacgagttggcgcgtgtctctccacctcttgctgctacgttgcaaaagcaagccccgacagtcaatgacaataagctgtctttagtagcgcaaaacgaagcggaagcagaagcgataaggcgaaagcttgccgacccgtttaaagacatatgcggccagtttggcttacctgtattgccccttgcagtcgccgtacaacaatcacaggaagcctatgatgagtttgttcgcaaacgtgctgaagaagaccggtcaaaagtggtcgaagcgatgttggaaaaacaacgggttgaagaggaaatggcgaagcaagtaaagcaagcgaacttgtctatgggttatcccattaaagacgagccgacgccgctggaagcgattgtcgatgaagaacggcgcattaccattcaaggctatgtgttcgccacagatattcgtgagctccgcagtgggcgcacattgctaacctttaaaatgacagattacaccgattcgattttagtgaaaatgttttcccgggataaagaagatgtgccagtcatgcaagcggtcaaaaaaggcatgtggttaaaggtgcgaggcggcatccagaacgatacatttgtccgcgacctcgttatgattgccaatgattttaaccaagtaacgccaattgtccgcgaagatactgctgaacaaaaacgagttgaacttcatacccattcgacaatgagccaaatggatggcgtcgtttctgttggcaggtatatcgagcaggctgcaaaatggggccatccagcgattgccattacggatcacggcgttgtccaagcgtttccagaagcatatggcgctgccaaaaagcatgacattaaagtgatttatggcatggaggcaaacgtcgttgatgacggcgtaccaattgcttacaactcagaccaccgtcacttgctcgaagaagagtatgtcgtctttgacgtggaaacgacgggtctgtcggctgtctacaatacgatcattgagcttgctgccgtcaaaattaaaaacggcgaaatcatcgatacatatgaatcgtttgcagatccaaaagagcctctgtccgcaacgatcatcgaattgacagggattaccgatgacatggtccaaggcgctcctgaacctgctgaggtgctgaagcaatttcgtgaatttgccggcaatgccacgttggttgcccataatgcgagctttgatattggctttttgaatgtcggttataaaaaactaggcttttcggaagtcacaaacccagtcattgacacgttggagcttggccgttttctgtacccagaattaaaaaaccaccgtcttaatacgttatgtaagaaatttgacattgagctcgtcagccatcaccgcgcgatttatgatacacaggcaacagcatatttgctttggaaaatggtcaaagatgcggcggagaaagaaattgtttaccatgatgaattaaataaccatatggggcaagggaatttccaccgtcaacggccgttccactgcacgctgcttgtcacatcgcaaacagggttgaaaaatttataccagctcgtgtccatgtcccatgttgattactatttccggacgccacggatccctcgttcccagttaaataaacatcgggaagggttgctaatcggttctgcttgcgataaaggagaagtctttgaaggcatgatgcaaaaatctgccgatgaggtggagaaaatcgctggtttctacgactttttagaaattcaaccactcggcaattacggacacttgattgaacgggaactcgtaaaagataaaacggcattgcaagaaattgtcggcaatattgtcgctcttggcgagcggctagggctgccggttgtggccacagggaatgttcattatttaaacgaggaagatgcgatttaccgcaaaattttaattgcttcccaagggggagccaatcctcttaataagcagaagttgccggacgtccatttccggacaacaacggaaatgcttgaagaattttcctttctcggggcagaacaggcagagaaagtggttgtcactgcttctaatgacattgccgcacaagtgggtgatgtccatccgattccagatgacttatatgcccctaaaattgagggcgctgacgatgaaatccggaatatgagctatgaacgggccaagatgatttacggcgatccattgccggaaattgtagaagcccgtttgcaaaaagagttaaaaagcattattggccatggttttgctgttatttatttaatttcccataaactagttaaaaaatcgcttgatgatggctatctcgttggctcccgggggtccgtcggttcttcgtttgtggcaacgatgacggaaattaccgaagtgaatccgctgccgcctcattatgtatgcccgtcatgcaagcattcccatttctttgatgacggttctgttgcgtctggctatgacttgcctgatgctgaatgcccgaaatgcggcagtatgtatattaaagatggacaggatatcccgtttgaaacgtttcttgggtttaaaggcgacaaagtgcctgatatcgacttgaacttttcaggtgaataccagccccgtgctcacgcttatacaaaggaattgtttggcgaagactacgtgtaccgtgccgggacaattggcacagtagcggataaaacagcatacggctatgtaaaaggctaccaaaacgaccatgatttgctcatgcgtggggcagaaatcgaccgccttgtcgccggctgcacaggcgttaaacggacaacgggccagcatccaggaggaatcatcgttgttccagactatatggacattcatgatttttcgccgatccaatacccggccgatgacaaaaatgcagagtggaaaacgacgcattttgacttccattcgattcatgataatttgcttaagctcgatattcttggacacgatgatccgacggcgattcgcatgcttcaagatttaagcggaatcgatccaaaaacgattccgacggatgaccctgaggtgatgaaaatctttgcttcaccagatgtcctcggtgtgacagaagaacaaatactgtgcaaaaccggtacgctcggcattcctgagtttggcacccgctttgttaggcaaatgcttgaggaaacgaaaccgagcaccttttctgagctgttgcaaatttccgggctctcccacgggactgacgtttggcttggcaatgccaatgagctcatttacaatggcacgtgcgaattgaaagatgtcattggctgccgtgatgacattatggtttacttaatttacaaagggctcgaatcgtcactcgcttttaagattatggagtttgtccgaaaaggcaaaggcttgcagcctgaatgggtcgaagaaatgaaaaagcatgatgtgcctgattggtatattgattcatgcacaaaaatcaaatatatgttcccgaaagcacatgccgctgcctatgtgttgatggctgtgcggatagcttattttaaagtccatcatccgattttgtattatgcaacctattttactgttcgtgctgatgactttgaactggacattatgatcaaaggcgcaagttcgattcgtgccaaaatggaagaaatcaacgcgaaagggcttgacgcgtccccgaaagagaaagctgttttgacggtgcttgagctctcactagaaatgtgcgaacgtggcttcggttttcataaagttgatttatataaatcatcagcaacagagtttatagttgatggcgataagctgttgccaccttttaacgcactaaacggcgtcggcacaaacgcggctctaaacatcgtcaaggctcgggaaaatggccactttttgtcaaaggaagacttgcagcagcgggccagattgacaaaaacggttgtcgagaacttgtctgaacatggctgtttagaaggcttgcctgagtctaaccagctatcgttgttttaaagacgggcctgccttgcaagcgtagtgcttatgtggtacaatcgtttatggtaatagttagcatacgatgatggagaaaagagtgggggcacccactctttttgttcgcattgcgggttcggcgtttaaaagcgtctcctgttgtgtatgcctgttctagaagcggatacgtttttaatgatgtaaaggaggaattggcgattgagtaaaaatgtttctcgtaccgtagaacaactcgcagagccgattgtccgcgaacttcatttggaactcgtggaagtagaatataaaaaagaagggcctaattggtatttgcgtgtgtttattgacgcagacagaggggtcaacttagatgattgcgaagctgtgagtgaaaagctgagcgaagtcttggatgaggtggatccgattaaagaggcgtattttctagaagtgtcatcccctggggcagagcggccgctaaaaaaagaagcggatgtaaaaaaagcagtcggcaaaggcgtgtacgtgacaacgtatgaaccaatcgacggccaaaaagcgtttgaaggcgtccttgtatcatttgaagacgccacgcttgttattgaaggaaaaaacaaaacaagaacagtgacctacaccgtgccatacgcgaaagtggcaaatgcgcggctgtcgatcctgctctagttgcaagcgaaataagggaggttcctttccatgaacagcgaatttatggaagctttgtcaacacttgaagcagacaaaggcatcaaaaaagaagtcattattgaagcaatcgaagctgcgcttatttctggctataagcgtaacttcggccaagcgcaaaacgtgcgcgtggatgtgaatcgtgacaatggcagcatccgcgtgtttgcccgcaaagtcgtcgtggaagaagtatttgataaacgcttggaaatttcagaagcggaagcgcagcggattaatccacattatgaagtcgacgatattgtcgaaattgaagtcacaccaaaagactttggccgaattgctgcacaaacggcgaagcaagtcgtcacgcaacgtgttcgggaagcagagcggggcatcatttattctgattttattgaccgtgaagaagatattatgaacggcattgtccaacgtcaagaccatcgctttatttacgttgacttagggaaagttgaggcgcttttgccgctgtctgaacaaatgccgaatgaaacgtacaaacataatgaccgcatcaaagcatatattacgaaagtcgaaaaaacgacaaaaggcccgcaaattttaatttcccgcacccatcctgggctcttaaagcgtttgtttgaattagaagtgccggaaatttacgatggcaccgtagaaattaaatcggtttctcgcgaagcgggggatcgctcgaaaatcgccgtccactccgacaaccccgaagtcgattcagtcggagcttgtgtaggccaacggggccaacgggtacagacaattgtcgatgaactcaaaggcgaaaaaattgacattgttgaatggtcagaagacccagttgtttatgtggccaatgcccttagcccagcaaaagtaatgaaagtcaatgtgcttgaaggggaaaaaatgacacaagtcatcgtccctgactaccagctgtctttagcaatcggcaaacgaggccaaaacgcccgattggccgctaagctgacaggttggaaaattgatataaaaagcgaatcagaagcccgtgagcttggccttcttgatgaggaaaatgaaaatgatgagttagaagaattcacaaatgaggaaaatgaacgttaggagcaggaggcggaaaatcgcatgaaacaacggaaagtaccgctgagaaaatgcattgtgaccaatgaaatgaaaccaaagcaagaacttgtgcggatcgtgcgcacacctgaaggcacagtcgaattggacccaactggcaaaaggaatggccggggcgcttatttgacgaacagtgaagacgtgtttaacacggctaaaaagcgcgatagcctaacgcgccatttgcaagtgcaagtgaccgcagacgactatgaccgcttgattgcagagcgggtaaaggtgaaaaagcggtgagcaacgataaaaagctgctctcgctccttggcttatgccaacgtgccggacagcttgttacaggggaagagttggttcttgccgcgattcgcaaacaggagctgtcaatggtgatccttgctggcgatgctagcagcaataccgaaaagaaaatcaaggacaaatgcggctattataaaatcccagtctatcaaacgagcgaccgttttgcgcttgggcaagcgatcggtaaagaaacgcgcgtggcaataggcataaggagtgaaggatttgcgaagaaaatcgccgcattactgagccaataatggaggtacgtatatgtcaaaagtgcgaatctatgaatacgcgaaggcaaataatgttcaaagcaagcaactaatcgaaagtttaaaatcaatgggtgtggaagtgtcaaatcatatgtcagcaattgatgaagaaacattaaacaaagcaaagcaagcaggaaagcctgccgctgcaaaagggcaagggtccactagtaaccaaaagcaaaatagccaaaatcaacggtcaaaccaagggcaaaagcaacgcccacaaaacaaccagcaaaaccaaggacaaaagcagcgcccgcaaaacaatcagcaaagtcaatctcaagggcaaacgaaacgcccaagccaagcgagcaataaccaaagtggcgccgcaaaatcgcaagctgggaaaccaaaccaaaaccgtggcggaaaccgtcctggtggccaagggcgtccaggcagcaacaaccgccgtccaggaaataaccaaaatcgccgcaaccatggcaaccgtggcggaaagcgtcgtccgcagtcaaaagtcaatcatcagcaaatgccgctgcctgaaaaaattacaatttcaggttcccatacggtcagtgaacttgccgctaagctccatcgtgaagcctctgaattgattaagaaattaatcggtcttggggtgatggctaccattaaccaggagcttgacaaagatacgattgaattgttggccgctgattatggggtggaagtcgaagaagaagtgattgtggatgagctcgatattgagttgtatgatcgtgaagataaagaggaagaattaaaagagcgcccgccagttgtgacaattatgggccatgtcgaccacggaaaaacaacgctgcttgattcaatccgtaacacgaaagtgactgcgggggaagcaggaggcattactcagcatattggcgcttaccaaattgaacactcaggtaaaaaaattacctttttagatacaccaggtcacgcagcctttacaacaatgcgggcccggggcgcgcaagtgacggacattacgattcttgttgtggctgctgacgatggcgtcatgccgcaaacgaaagaagcgatcagccacgcgaaagcggctgaagtgccgattattgtcgctgtcaacaaaattgacaaggaaacagcaagtccagatcgagtgatgcaagagttaacggagtttgagcttgtccctgaagcttggggaggcgacacgatttttgttaatgtttcagcactgacgggtgaaggcattgatgagttaattgaaatgattctactcgttgccgaagtggaagaatttaaagccaacccagacaaactcgcgacaggtacagttgttgaagcacagcttgataaagggcgcggcccagttgccacgcttcttgttcaaagcgggacgttgaatgtcggggacgcagtcgttgtcggcagcacatttggccgcgtgcgtgcgcttgtgaatgatgtcggccgccgcgtcaaaacagcaggaccgtctgcaccagtggaaattacaggcttaaacgaagtgccgcaagcgggggaccgtttccaagcatttgaagacgagaaaaaagcccgccaattaggcgaagggctaatggcccgttatcgggagcaaaacttaacagcatcgtcaaaagtaagcttggatgacttgtttaaccaaattcagcaaggggatgttaaagacattaatgtcatcatcaaagccgacgtccaaggctcagttgaagcgatgaaaggatcgttggagaaaattgatgtggcaggcgtaaaagtcaatatcatccacactggcgcgggtgcgatcacggaatcagacattattttggcgtctgcttccaacgcgattgtcatcgggttcaacgttcgccctgatgtgaacgccaaacgtgtggctgaagccgaaaacgtcgatattcgtctccaccgtgttatttacaatgcgattgacgaaattgaacaggcaatgaaaggcgcccttgatcctgagtttgaagaaaaagtcatcggccaagtggaagtacggacgacattcaaagtttcgaaagtcggcacgattgccggttcttatgtaacagaaggaaaaatcacccgcaattcttctgtccgtttgattcgtgacggcattgtcatttatgaaggcgaactgaacgctcttaaacgctataaagacgatgctaaagaagtgcaggctggctatgaatgcggaattacgcttgataagttcaatgacattaaagaaggcgacatgatagaagcgtatgtcatggaagaagtgaaacgtgcctaatgatggccagtgtccgctgcgagctgttcatttatgaggcacagtcattgaaggataaacgatccgtcttgcaaagcgtgcttcgcaaagtgaggcaacgttgcaatgtttcagcagcagaaacaggttaccaacaaacttggcaacgcgcagagctgtcgctttgcgcagttgctgctagtaaaaaaagcgctgaagctgaactattacgcgcattggcgataattgatcaggcagaagcggctgagcgcacattgaccaactgggagtgggcgtgattcccattagtagaggtgatcgattgtggcgaataaccgtgctgttcgcgtcggcgaacaaatgaaaaaagaattgagtgacatccttattcgcgatattaaagacccccgtgtccgttttgtcacggtgaccggggtagatgtcacaggggatttacaacaagcgacggcttttattacggtgctcggtgatgaggaagaacgcaaagcgacccttgccggccttgaaaaggcaaaggggtttatccgtacggaattgggcaagcgcattcgccttcggaaaacacctgagctcagtttttcgttcgatgaatcgatccaatacggcaaccgaattgaaagcttattgcgcgatttgaataaaaatgattcgaacgagtagttgcaaaggagagcgcgcagacgttctcctgagggtagcgcactgacgctatcctttctttttttagtaagacagggagtgatgttgatggagccaacagggattgtggtgctggacaaaccgaaaggatggacatcccacgattgtgtccaccaaatgcggaaatggtttcaaacacggaaagtcggccatacagggacgctcgatcccgaagtggatggcgttttgccgatctgcatcggcaaagcgaccaaagtggtcaaatacatgtccgattacgataaaacgtatataggggaagtcacattcggcgtggcgacgacaacggaagacgcacacggtgaagtcgtagaagagaaacgcgtcaataaaccgtttacgcgtacggaaattgaagcgttgctgcaagcctttatcggcaaaattgagcagacacccccttattattcggctgtaaaagtaaacggcaaacgcttgtatgaatacgctcgagctggcatcgaagtcgagcggccaacgcgcacagtggaaataaaagcgttgacattgacggaaataacaactgcgaagccaggttgtttttcgtttgccttttctgtcacatgtacaaaaggtacttacatccgtacgcttgccgttgatataggcaaaaaagctggctaccctgcccatatgtcaaagctgacacggacagcatctggcccgtttacacaagcagatgccattcctttatctgcatttgcggaaatgagtttggatgagcgcctgaataagttgcgcccccttgatacggctcttcagcattttccacgggtcactgccgataaggaactggaaaaacgaatacgcaatggtgctgtcctggagaaaagcgcttcttttggagatgggcgttttttgttttataatgaacaaggagattgcttggcattgtatcaagcacatccaacaaaggctggacttattaaaccagaaacgttattttgtcatgtttaacggtaaagggggaaaagtggtggtagtggagctagatctagattcaattagccacatagaggccccagcgccaacagctatggctcttggctattttgacggcgttcacaaagggcacaaggcggtcatcgaaaccgctaaagcagaagcggctaaacggggcattcagtctgcggtgatgacgttttacccccatccgaaagaagtgcttggtaaaccggatcagccaattgattatttgacgcctctgcaagcaaaagtggcgcgcctaaaggcgttaggggtcgacgttgtctacgttgtccattttacgaaggcgttttcgaaactgacgccacaagcttttattgagcggttcgtgattggtttaaacgtcaagcatgtggtggcaggctttgactttacatacggcgttaaaggggaaggcaagatggacgatattgaccgttatgcgaacgggcgctttacgcatacaacggtcgaacaagtgagcgatgagcaagaaaagatttcgtcaacgcgtattcgtaaacagctgtcagaaggaaatgtcagtgaagcggccagcctcctcggctacccgtatgttttctctggaacagttgtccatggagacgcacggggacggttaattggctatccgactgcaaacattgttgcaaaagagcggttcatcgtgccgaaaacaggcgtctatgttgtcacattgacacatgcgggcaacacatacgaaggaatggcgaacatcggctataaaccaacatttgtcgatgatttagcaaagccaatcgtggaagtgaacattttcgacttcaatcaggagatatacggggagacggtggaagtcgcgttttacgaacggattcgttcggaacaaaaatttagcggcattgatgaaatcaaagcacagcttggccgtgaccgtgccacggcgttgcagtttttcaagcaacatacggccaatggctaagtgcggacacctaaacagttaacgtctttaaggggaagcctacgtttttagcgcgtccaagtgatttttgcgatgtggttacaggcaaagaagataaaatgaacgcttgcatttgcagatcaatcaagctatcatagaaagtgtctgcatccccatgcggacacgatacccgtttcttggcaaaacgactcaccaccgtttgctcggagattggggttttagggaaaaggaggtggctctgatggcattgacacaagagcgtaaaaatgaattgattgcagaatttaaaacgcatgagacagacactggttctccagaagtccaagtcgctattcttacggagcaaattaacactttgaacgatcacttgcgcacgcataaaaaagatcaccactctcgtcgtggccttttgaaaatggtcggtcaacgtcgtaacttgctaacttatttacgtaataaagacgtaacgcgttaccgtaaccttgttgacaagcttggcttgcgtcgatagttttgcaaaaaagcgggggatgatctcccgcttttttcttcatgccttccgttagcaggcgacaagcttagaaaaatggaaaacgaccctaatttcactcttttaaacttgttctgattcggtcataataagaaagaagaattttagttgtacgagaggagtacacattcatggatcaagaacgtcatgagttttcaattgactgggctggccggacattaagtgtcgaagtcggtcaattagccaaacaagccaacggagcggttctcgtccgttatggcgatactgctgttttatcaacagcgactgcttcaaaagaaccgaaagaccttcctttctttccgttaacggtcaattatgaagaacgtttatatgcagcgggaaaaattccaggtgggtttattaaacgggaagggcgtccaagcgaacgggcgattttaacaagccgtttgattgaccgtccaattcgaccactgtttccagacgggtttcgtaacgatgtccaagtaatcagcattgtgatgagctctgaccaagacgcctctcctgaaatggcagcaatgatcggttcatcactggctctgtgtgtgtctgacattccgtttgaagggccgattgcaggtgtgactgttggaagaattaatggcgaattcattatgaacccaacgccagctcaacttgcagagagcgacattgacctaactgttgctggaacaaaagaagcgatcaacatggtcgaagccggtgctaaagaagtcccagaagacgtaatgttagaagccattttagccgggcatgagaacattaaaaaaatgattgctttccaagaaaaagtggtggaagtttgcggcaaagaaaaacgtgaagtgcagctgaaaacttttgacgctgaattggaagcacgcttgcgtgaaagcgcggaagcgagcatcaaagaagcggttcggattgcggaaaaacacgcgcgtcaagatgcgatcgatgagatcattgctgcacaagtggaacaacattcagacgatgacagcatcaatgtggatgaagtaaaagagattttgcaaatgttcgtgaaggaagaagtccgtcgcttaattactgtcgaaaaaatccgtcctgatggacgaggcgttgatgaaatccgcccgctctcgtcacaaatcaagctgttgcctcgtacacatggctccggtctctttacaagaggacaaacacaagcacttagtgtctgtacgcttggtgcccttggcgatgtacaagtgctagatggtttgggcatcgaagagacgaagcggtttatgcaccactacaattttccgcagtttagcgttggcgaaaccggtccgattcgcgcgccaggacgccgggaaatcggtcatggagcccttggcgaacgtgcgcttgagcaagtcattccaagtgagcaagagtttccttatacgatccggctcgtatctgaagtgttggagtcgaacggatcaacttcacaagcgagcatttgtgcaagcacgttagcgatgatggacgcaggtgtgccaattaaagcgccagtggcaggcattgcgatggggcttgtcaaacaaggggaacatatgacggtgctcactgatatccaaggcatggaagacgcgcttggcgatatggactttaaagtcgctggcacagcgaatggcgttacagctttgcaaatggatataaaaatttccggcattaaccgggaagtgctcgaacaagcccttgaacaagcaaaacaaggccgaatgaaaattttaagcaacatgatggaggccattgacaaacctcgtgccgagttgtcggagtatgcgccaaaaattttgacgctaacgatcaatcctgacaaaattcgcgatgtcattggaccaagtggcaaagtcatcaataaaattattgaggaaacaggcgtgaaaatagacattgagcaagacggcactgtctacatttcttccctagataccgccatgaaccaaaaagcgaaacaaatcattgaagatcttgttcgagaagttcaagtcggcgaaacataccatgggaaagtcaaacgcattgaaaagtttggtgcctttgtcgaactgtttaaaggcaaggatggcttgctgcatatctcacaaattgctgaagagcggatcaacaaagtcgaagatgtctttaagctcggtgatgaagtagatgttcgcgtcactgaaattgacaatcaaggacgagttaatttgtctcgcaaagtcctgttaaaagaacaacgggaaaagctagaaaaagaagaagcaaaagatacagcgaacgaataagaaacaaagactggggaaaattcctagtctttttttatggtcaaacgtctagtcctcttcatttgctcatagacatgctagtaagtatctagcaggaggggacacaatgaaacaaaaatggcttcacttctgtttgtgtggtgtcatggtcgtgctggcaataggcgcgattcaaaacccattttcgcttcagtatatcgacaccttgaaaacaaacgcaacggaagatgtagatacagaagagaatgagttgttaaaacaaattaaagcgcatgcagaaaaagtggcgattccagcaacaaacgcacgcattgacaaagtctggaaagcattgccaggttataacgggcttgaggtcgacattgaacaatcttataataaaatgaaggagtctggaagtttcaaccagtctaaactcgtctttaaagaaacaaaaccggatgtccatcttgaggatttgccaccagccccgacgtataaaggtcacgaagaaaagccgatggttagctttttaatcaatgtcgcctggggaaatgagtatttgcctgatatgttaaaagtgttgcagcagtatgatgtcaaagcgacgttttttttagatggatcctgggtgaaaaaaaatccacaacttgctgtaatgattaaagaagaaggccatgagattggcagccatgcttattcgcaccctcacatgaatgccctctctaaggcggaaatagacgaagagttaacaaaaacgacggaagtaattgaagcaacactggatgtcacaccaaaatggtttgctcccccaagcggcgaatttaatcaactggtggttgaacgagccgctgcctatgatatgcgtaccattttatggacagttgatacaattgactggaaaaagcccgaaccatctgttatggttgaacgggttgtcaatcaaatgcaggcaggctcgatgttgttgatgcatcctacagagtcatcgtcaaaaggactggaagcgattatacaagggatgcaagaaaaacagttgcagatcgggactgttagcgatttaatggatgaaacaagaattgccgcaaaaatgacagctgagagcaatgggggtacaaaacgtgattaaaaaagagacgctggacaacggcgtgcgcattattgcggaagccaacgaggccattcggtctgttgcgattggcatctgggtaaaaacaggctcccgcaatgaatcaaatgaggaaaatggcatttcccattttattgaacatatgttgtttaaaggaacaaaaacgcgttcagccaaacaaatcgcagaagcgtttgaccgcattggcggacaggtcaatgcgtttacggcaaaagaatacacatgctactatgctaaagtgctagatgagcatgctgctttggcccttgatgtactacaagatatgttttttgactctatttttgataaaacagaaatagagcgtgagaaaaaagtggtgctcgaagaaatcaaaatggtggaggacacgccagacgacctcgtccacgatttgcttagtcaagctgtttttggccgttcctcgctagcgaaccctattcttggcacagaagacacgctccaaacatttagccgtcagcaaatcagtgattacatgaagcgtttctacgcaggtgaacgagtagtcgtgtcggtttgcggccattttgacgatgcgttgcttgagcaaatcagacaaaccttttcccgtgtgaaacgagcaccggaaccgtttgctgtgccaacagcgactttctcgccgacagtgaaatatcgccagaaagattctgagcaagcacatctatgtttagcctaccctggcctggaaattggttcaaaccgttcatttgggctgattttgctaaacaatgcccttggcggcagcatgtcgagccgtttattccaaacgattcgcgaagaacaaggcttatgctattctgttttctcctatcattcttcgtatgaacaaattggtacgcttaccatttatgcaggtacgcaaatggcacagttgccaaagttaacggaagctctcgcagaagtaacgaaagcggtgcgtgcagaaggccttagcaaaaaagagttggaaaatggcaaagagcagctcaaaggcagcattatgcttgggcttgaaagcacaagcagccgcatgacacgaaatggaaaaaatgaattgcttttacaagaacataaaacattagacgagttgatcgcggatattaatgctgtcagtttggagatggtcaacgatctagctagccagctccttcgggatacgccggctgtttcacttgtcgcctcaagcgaaacaatgccgtcaacgattttcagcaactagtctactttctttccgacgtacatacattggaataagaggtgatgggcttgcggctaagtgaaattgctaacaaagaaatcattgattttgagaaaggcgaacgtcttggtgttttgggacagaccgatgtgctgtttgacgagcacaccggggaaattcacgcctttgttgtcccgacgagccgctggtaccaattaaaccgcaaagacaaagaagtaacggtttattggcagcaaattaaaaaaatcggccaagacatgattattattgaaacataaggatggtggttgcctttggcgaccgcctcaataaggcagagagacgctcgcatacgtcgttgtttgcctaccgttgaaagcttgcatttgcaagctttttttgtgtctgcaccgattggttcacttagtcatatgctttaaaagaagcaacgcataaaaggaggatcagcatgctcactggaacccatgtggtcatgattggcggcgatgcacgccagcttgagatcattcgcaaattatcggcacttgacgcaaaaatttcccttgttggttttgaacagttaaatgatggcttcattggcgcaagcaagcaagagttgcctgatatcgagtggtcgacagtggatgcgattttgttgccggtgggcggcatgtccaatgatggcctcattgccagcgttttctcaaaccagcaattaaagttgaaagccgcttacttaaatgaaacgcccgaccattgcacgatttatacaggcatttcaacagaccgattagaaaaattggctgcaaaagcaaagtgtaaaattgtcctattaatggatcgcgatgatgtggcgatttacaactcgattccgacagctgaaggcgcagtcatgctggcgatccagcatacagaccatacgatccaccatgcgaaagtggcggtgctcggccttggccgcatcggcatgaccattgcccgcacattccatgcccttggtgcgagcgtttttgtcggtgcaaaggaaacggcattgctcgcccgtgccttcgaactcggagtcgagccatttccccttactgcactaaaagaaacgttaaaaaacatcgatctcgtaatcaataccattccagctaaaattgtcacatctgacgtcctcgccgaattaccacaacatgcttttgtccttgacttggcctcaaaacctggtggcgtcgattttgcgtacgccaaaaaaagaggcttgaaagccatgctcgttcctggtcttccaggcatggtcgccccgaaaacagcaggcaagattttagcaaatgttttaagtgatttgcttcatgaacaaacacaatcataacgaaggagcgtgcgcgatgcttaaaggcaaacatatagggtttggcctgactggctcacattgcacatttgacgctgtttatccgcaaatcgagaatttggttgagctcggcgcgaaagtcaccccttttttaacctatacagtagagacgacagacaccaagttcggcgacagtggggattggatgaaacggctgcaaacgatcacttctgagccatttgtcaattcgatggtcaaagcagagccctttgggccgaaaacccctctcgatttaatgattattgccccgatgacaggaaattcgatttctaaatttgcgaatgcgatgacagataaccctgtacttatgggggctaaagcgacattgcgtaacggcaagcctgtcttgcttggaatttctaccaacgatggccttggattgaacggcgttaacattatgcgcttaatggcaacaaaaaatatttactttattccatatggccaagatgaccatgtgaaaaagccgaattcccttgtagcccatatggatcaactcattccagcagctgaagcagccatgcacggcaaccaacttcagcctgttcttgtacaaaaataggctttggacagttgcgtatcgtcgggaaatcccgtaaagtttagtagaggataagagatagatagctgaactttgagggaggatacgaaaccatgaacgaacaacaacattttgacgtcgctgtcgtcggggcaaccggcgcagtcggccagcaaatgctgaaaacattagaacaacgtgattttccaattaagagcctaaagctcctttcatcgaaacgttcggctggaaaacaaataacgtttaaaggccaatcttatacagtcgaagaggcgacgcctgagtcgtttcaaggtgtacaattagcccttttctcggcaggcggttcagtttcgaaagcgcttgtccctgaagcgattaagcgcggagctgtttgcgtcgacaacacgagtgcatttcggatggatactgacgtgccccttgtcgtgcctgaagtcaatgaaagcgatttgcgcaatcaccaaggtgtgattgccaatccaaattgttccacgatccaaatggtagtcgcgttggagccgatccgcaaaaagcttggattaaagaaagtgatcgtgtccacataccaagccgtttcaggggcagggcttgaagcagtcgaggaaatggaaaagcaaacacgggctattttggacgggaaagaagcaacagcagaagtgctgccggtcgcgaaagagaagcgccattaccaaattgcctttaacgcgattccgcaaattgacgtgttccaagacaatggctatacgttcgaggaaatgaaaatgatcaatgaaacgaagaagatcatgcacatgcctgaacttgaagtggctgctacatgcgtgcgtttgccgattgaaacgggccactcagaatcgatctacttcgaaacggagcagtctggagcaagcgtaaaagaaatccaagctttgctaagcgaagcgccaggcattacactccaagacaacccagcagaacagctttaccccctcgtcacaaatgcggttggcaaaaacgacgtatttgtcggcagagtgcgccgcgacttagatcgtgacaatggctaccatgcttgggttgtgtctgacaatcttttaaaaggggcagcttggaattctgtgcaaatcgccgaaagcctcatcaagctgaacctattgaacaagtgagtgaatcaaacatgaaaatcattatccagaaatttggcggtacatctgtaaaaacggacgaatcgaggctgcaagcagtacgccatgttcaaaaagcagtcaatgatggctacaaagttgtcgttgttgtctcagcgatgggcagaaaaggcgatccttatgcaaccgatacgctgcttagcctcgttagcaaatcccgcatcacgaagcgggaacaagacctactcgtttcttgtggcgagacgatttcagcggttgtgttttcagacctcctcaatgcacatggtgtccaagcgacagccatgaacggggcaaaagcaggattccgtacaaacgaggagttcggcaatgcgaaaattaaagaaatgaaatgcgagcatttgcttaaaaagctagagacagaagatgtcgtcgttgttgccggttttcaaggacagtcgaaaagcggcgatgtaacgacgctcggccgcggtgcgagcgatacatcggcaacagctctgggagcagctcttcacgcagagtgggttgacatttttaccgatgtagaaggtgttatgacggctgatcctcgaattgtcagcgatgcgagagcattggaagccatgtcttacaatgaaatttgcaacatggcgtaccaaggcgcaaaagtcatccaccctcgtgcggtggaaattgccatgcaagcgaaaattccgatccggattcgctccacttactcagacaacgaagggacgctcgttactgcccttggcgcttcccattcaatggatgtcaacgaacggatgattacagggattgcccatgtggcaaatgtgacgcaaatcaaagttgctgcaaaagaaggtcagcttgacttacaggaaaatgtgtttaagtcgatggcccaagctaagattagcgtagactttattaacattagcccaagtggggtgacctatactgtcagtgatgaggcggcagataaagcaaaacaagtgcttgagcatcttggatacacgcccgagcttcggcgcgggtgcgcgaaagtgtccgctgtgggagcaggaatgagcggtgtacctggcgttgctgcgaaaattgtcagcgccttaagtggcgagaatgtacaaattttgcaatcggcagattcccatacaacgatttgggtgttggtcaaaaatgaagatatgaaaaaggcagtgaatgctctgcacaaaatgtttcagctcagtgaagcgacaactgtgtaatttcccataaacggagggggcgcatgtgaaaccaacaggaaaatacggcccagtgtggacagctatggtaacgccgtttcaatcaacgggtgcaattgattatcagcagacagaacagcttatcgagcatttgattgaaaacggaacggatgttctcattgtagccgggacaaccggagaatcaccgctgctgtccaaggaagaaaaattagagctgtttgctttttgtgtcaaacaggccaacgggcgcgcagccgtcgtggctggcacaggttccaatgatacgcatgcttcggttgagctaacaaaggcggcggaaaagacaggcgtcgacggtgttatgcttgtcaccccgtattacaataaaccgtcgcaacaagggcttttttgccattttagtgaaattgccaacgagacaaacttgccagtcatgctgtacaacgttccaggcaggacgggagtcaacctcgaggcggaaacaacgattgccctcgcgaatgtcaacaatatcgtagcgattaaagaagcaagtggcaatttagaacaaattgcggccatcatcgagcatacgccagcctcatttgctgtttacagtggtgacgacagcatgacactcccaattttagcgattggcggtgatgggatcgtttctgttgcctcccatctgattggcaaggaaatgcaagcgatgattggtgcgtttcaggcaggggaaaatgggaaagcggcaatgatgcaccgtaagctgttgcctgtcatgcaagctcttttcctagctccaaatccagcgtgtgtaaagtatgcgcttaacaaaaacggcattgacgttggcgaagtaaaaccccctcttgcccctgtgaacgatcaggaaaaagcggtggttgaccaggcgctggcgacaatccaatcgcgataaacgtcatttgaacgcgatgacgcttgatgccgagatgcgaccaaatgaaggtgaaaatggagcgactgttcctaaacatataaggtgaacaacgaagaaagcaagcgtttgtttatcgtctaagcccctgttgcagctggctgcaacaggggcttttagctgtgtgcgaacgtcgtcaatgaaatcccccttgtttttatcttgaaaattaaggtatactaagttccaagtgatgcgttcgggtaaaggtggtcatggaagccgccattgttaaaagaaaatcggcattggaacggaacgaaatcggaaaatgatagctcggttctctaaatgttcaatcagctaatgtgtgtttccaagaagcgccacggtcgctttaaacagggaatgattgaatgtttgaaaccgcgtgttgtttgtcgtgcgagattggcgtccatgaagcctgaagtacgcactaaacggaatttgaaacgattacaagaacaaccagttaagtatgactagcgttgtaactaggaggaaaatcattgtctaagcaagaaacagaaaaagtgcgtgtgtttgccctcggcggagtcggcgaaatcggcaaaaatatgtacggcattgaagtagatgaggatatcattgtcattgacgcgggtttaatgttccctgatgacgatatgcttggagtcgacatcgttattccagatgtgtcttatttagtggaaaacgaagaacgtgtacggggaattattttgacacatggacacgaagaccatataggcgggttgtcgtatgtgctgaagaaaatcaacgtgcctgtgtatgccacaaagctaacgttagggctcgttgaagagaaattgaaagaagcaggcattcataggcacgcagaactgcgcttaatcgattccaactcgcgcattaagttaggaaatacaccagtatctttctttcgtgttagccatagcattccagattgtgttggtgtctgcgtggaaacgtcccaaggcgccattgtccatacaggtgattttaagtttgaccaaacaccggtcgatggaaaacatgctgatatcggaaaaatggcagcaattggccaaaaaggtgtgctctgcctcatgtctgattctacgaatgcagagcggccagggacaacaaaatcggaagcagaggccggcaaaggcataaaagacgtgttcgctcgtacaaaaggacgccttattgtcacctcgtttgcttcaaacgtccatcgaatccagcaagtgatccaagcggcttccgctaccaatcgaaagcttgcagttgttggcaaaagcatggtgcgcgttatttccatcgctggaaagcttggctacttgaaaataccgaaagatttattaattgatatggatgaagtgaacaagcataaaccagaaaaagtggcgattttgacaacaggaagccaaggggagccgatgtcagcgttaacgcggatggcaaaaggagcacatcgccatattacgattacaccaaatgacacagtgattatcgctgctacagcgattcctggaaatgagacaagcgtatccgccgtcatcgaccagctttaccggattggcgctgaggtgatttatggcagccaggctgtccatgcctctggccatggttcacaagaagagctaaagttgatgctgaatttgatgcgtccaaagtttttcttgccgatacacggggaaatccgcatgcagcatgctcaccagcaattggctttgcaagttggcataaaaaaagaacggatttatatagtcgaaaaaggggaagtcatagaattcacaaaacaacaagcacggcgcgggccaaaagtgccatcaggccatgtgttaattgacggacttggtgtcggcgatgtcggcaacattgtcttgcgcgatcgccgcttgctttctaaagatggcattctagtcgtggttgtcacattgaacaaaaagacaaacacaattgtatctggaccgaatattatttcccgcggattcgtctatgtccgtgaatcagaagagcttctcgaaaaatcaaatgagcttgtgacctccattttgcaaaaatgcgtgacagaaaatgttaatgaatggtcaagcttaaaaagcaacattcgtgaaggcttaagccgctacttatttgaaaaaacaaaaaggcggccaatgatcttgccgatcattatggaagtgtagccgtaagtttgttggaaaaaagcgtttaactgcatgaacatgctaaaagcctgagtcccttccttgaatggggctcaggctttcttatagcggcaacacataataatgaatgcttcgccccatactacgtttatgtaaagagaaggggtgtggactagatggaaaatgaagagcaacctgctccagaagagccgaaagagaaacaagaagagaaaagcacgcttgttgaaaaaatccagcagctcgggcaatcgaatgtgccggatatgggcgcttccaacatccattgcatgacggtcgttggccaaattgaagggcatatgcaactgcccccgcaaaacaaaacgacaaaatatgagcatatgattccacagttagtggccgtcgaacaaaatccgaaaattgaaggattgttaattattttaaacacagtaggcggcgatgtcgaagcagggttggccctttcggaaatgatcgcttcgatctcaaaaccaaccgttacacttgtgcttggcggtgggcattccattggcgtgccgattgctacagcggcaagctattcgtttattgctgaaacagcgacgatgacgatccaccctgtccgtctgactggcctcgtcattggcgtaccgcaaacatttgagtatttggataaaatgcaagaccgcgtcattcgctttgtcacctcccattcgcaaatatcggaagaaaaatttaaagaattaatgttttcgaagggcaatctcacccgggacattggcacgaatgtcattggcacagatgcggttgaatatggacttattaatgaagtgggcggcatcggccaagcgattagaaagctgaatgaaatgattgaggagcagaaagcagacggggaggttatccaatgattttgtacacgacgactccttatgaacttctttttcctgaagaagatacggtttaccaaagtcaacaagtgattgactgtgacgcaggccagcttgtcgttgagcgaattgacgatggcagctttcgagttatccgtctcctttcgagtgatccaaatgcctttttaaagcctgaatacgctccaggctcattgctttcagcgagatgggttccataaaaaaaccgttaaaaacggaatcgctgtagtggtgggcgccgaaaacatggtatgatataataacaacagtcgattttaagcagcctcgcgttttaggctgcttgttcgagtatgattttctagagggtgactccatggcaaaacgcaagaaacgaaaaaaaaaccagtggaagtcccagttgacttttgaacttgtaggattaggcctacttgtagtggctcttgtaacgctggcccgattagggagcgtaggggaagcatttgtccgtttatttcgtttcttcttaggagaatggtttgtcgttttggcgctcggtttttttgtaagcgcattgtacatcatgattaaacggaaaaaaccggccttgtggggaaggcgtttagctggactgtacacaatcgtgatttcgatggcgattttggctcacatcagcttattccgtgaacttcagctaactggcaacgttaacaatgaatcagttttgcgggggacatggaacctttattgggaagaaatgacgtctggccagtctgtcgatcttggcggcggtatgcttggggcagttggctatgcagtaagccactttttgtttgccaacgcaggtacatatttgttctgttttatcctcattatgattggtgccattttaatttccggtcgttcctttggagaaatggtcggaaaagcgtaccggcgcacgtatttgtttgtgactgattttgtgaaagcggcatggcaagactttgcttcttggcggaaacaggcaaaagtgaaaatgaatgaagaacgccaacaaaagaaagtgcgccagaagaaaaaacagcaagtaaacgaggaagtagaagaacaggagcttgaaccatgggataaacagactgagccagaaatcgtcgattttacgcaaaatgcacaggcaaagcctgaagaacaaacggtccatcctgttaagcaaggaaaaaaagaaggcgctgttgaagtggcggaggctggcggaacagaggaggatggagccctggtgccggctgacttggtgcagatggaacaagcgaatgaatcctatacattgccaagtcttgatttgttgctgacgcctgataagccagaacaaaagcaggaaaagcaacagttgacatccaatgcccgcaaattggaaaaaacacttgccagcttcggagtcaacgttcgtgtgtccaaagttcatttaggtccagccgttacaaagtatgaagtcaatccgagcattggcgtaaaagtaagcaaaatcgtcaacttggcagatgaccttgctctggcgcttgctgcaaaagacattcgcattgaagcaccaatcccgggcaaatcagcggttggcattgaagtgcccaatcaggaaattgcgattgtttctttaaaggaagtgcttgaaggagctgcgtcacgacaacatgaagtgctttctgttggacttggccgcgacatttcaggggaacctgtgctggcgccgctaaataaaatgccccatttgcttgtggcaggggcgacaggcagcggcaaaagtgtgtgcatcaacggcatcattacaagcattttaatgaaagccaaaccccatgaagtaaagctgatgatgattgatcccaaaatggttgagctaaacgtgtacaacggcattcctcatttgttgacacctgtagttacagaaccgaaaaaagcgtctcaagcactaaaaaaagtggtcgctgaaatggaacgacgctatgacttgttttcccatactggcacacgcaatatcgaaggctataatgactatattcgccgccacaatgaaacagaagaaggcaagcagccattgttgccctatattgtcgtcattgtggacgagctcgccgacttaatgatggtggcgtctggcgatgtcgaagattcaatcgctcgtcttgcgcaaatggcgcgagcagcaggcattcatatgattattgctacgcagcggccgtctgtagacgtgattactggcgtcattaaggccaacatcccgtcacggattgctttcggcgtttcgtcgcaaaccgattcgcggacgattttggattctggtggggctgaaaagctactaggccgaggggatatgctctatttgccaatgggcgcaaccaagccaacgcgtatacaaggggcatttttatcggatcaagaagttgaaaaagttgttgaatatgtcatttcccagcaaaaagcccaatatgtagaagaaatgacgccttcggttgatcaggcaacaaacagcgagcctgaagatgaattatacaacgacgccgttgacttagtcgtggaagtcggtactgcatccgtgtcgatgatccagcgccgctttcgcgtcggctatacacgggcagcccgcattattgatgaaatggaagcaagaggcgttgtcggcccatatgagggcagtaagcctagggaagtattgatcagccgtaatgatgaagaggcaacttcataaattagaaagaaagggttgcgatagagaggatggaatcggtgatgaaggcggatcatcggccgctttatatacaagtgatcgatcagttaaaggaagaaatcagccactacagtgaggggagtaagctcccatctgaatatgagcttgccaagcatttaggtgtaagcaaagaaacattgcgggaagcgttgcgcctgctagaagaagacggactcgttgtaaggcgctacggcgtaggcacatttgtgccttcaaagccgctgttctcagcgggaatcgaagagctgcaaagtgtaaccaacatgattgcgtctgcaaatatgacgccaggcacgatttatttgtcgtcaacgattgaagtttcggcagaggaagacagagcgcgttttaatcgatcggaatcgtttgaaatgctgcaacttgagcgtgtacggacagcagacggtatgcctgtcgtttactgccttgaccagcttccggcagatttagtcggcaaccgctctattcatgaaatgaagtcgatctttcagtttttagaagaggcaggccgaccaattgcttatgcgcttgcctcgattgagccgatcggctaccatgagcatgtaacggaagtgctggagtgcactcctgaaacggcgcttcttcttttaagacaaacccattatgatcatcatgatcaagcggtgctccactctgtcaattattttcggtctgacaaatttaagtttaatgttgtaagaaaaagcaaataagcaaaaaaaccgccaccttcggcggtttttagacgttgcggatgatttgccgcctttgttggcacactaaaagggccgctgttgcatcgtctgccttgctcgcagcatgcgagaaggagaggaacgacaaatttaagtttgtaaaggaagtgggcaaatggttgatttacaagtacgctcgtcgcagcaagcaggaatgaatatccattattggaaaacggacaaatttaaaaccgttacatttttattaatggcgaaagcgccattgaatgatcgtacattaacagcaagagcactcatcccttctattttgcaaagtggcaccaaaaactatagcaatcgcaaacagcttaggcgcaaacttgatgatatgtatggagcgattttaacaggcgacgttcaaaaaaaaggcgagcagcatgtactaagctttcgcatggaaatagccagtgagcggtttttgacaggccaacaaccattattaaaagaagcgctgtccctttttaaagaagttgtttttgagccgagactggaaggcgggtctttcgcgaaagcgattgttgagcaagaaaaacgggccttgtcccagcggatcgccgcgatttatgatgacaaaatgcgttatgccaacgtgcggatcacagaggaaatgttcaaaggcgaagcgtttgcccttccagcttatggacgcgttagcgaccttgatacactcgatgaacaggcgatttaccaagcgtatgaacgcatggtcaccgaagatcgttttgacctgtatatcattggcgcctatgatgaaaacgagctgactggctatatcgaggagctattcacatataagcgccatccaaaagcggaaggacaagcagcagccaagagcccggttcagataaccgaaaacctcgtgactgaaaagcaaaaagtcaaacaaggcaaattgcatattggctttcgtacacatacaacgtttggcgatgaagattatgaggcgatgcaagtcgccaatggcatctttggcggattcccgtcgtcgaagttgtttcgaaatgtccgcgaaaaagagagtcttgcttattatgccgcatctcgccttgaaagtcataaaggcgtgctaatggtaatggccgggattgaatttaataaatttgaacgtgcggttgctattattaaagaacaagcagaggccatgaaagcaggagagtttgacgaggaaacgatcgaacagacaaaagcgatgctcatcaatcaaatgctagaagcgattgatactccaagaggatttgtcgaattgtcttaccatgaaatggtagcagggacgacttatccaattggcgaacggattgaagcgttaaagaaagtcacgaaaatggatattgtcaatgcagcgaaaaaatgggaattggatacgatttactttttgaaaggggagagtgagtaatgaagccgcttgaatttaaacaattagaagagacgctttattatgagcaacttgataatgggcttgatgtttacattcttccaaaaacagggttccataaaacgtttgccacttttacaaccaaatacggttcgattgataaccattttgttcctcttggacagacagagccagtaaaagtcccagacggcattgcccactttctagagcacaaaatgtttgaaagcgaagaaggcgatgtttttcatacatttggcaaacaaggggcacaagcgaacgcttttacaagctttactcgtaccgcttatttattttcaagcacatccaacgtcaaccaaaatgttgaaacgctgcttgactttgttcagcacccttactttaccgatgaaacagtggaaaaagaaaaaggcattatagggcaagaaattacgatgtatgatgatgaccctgattggcgcgcttactttgggacaattgaaaatatgtattcaacccatccggtcaaaattgacatcgctgggacgatcccgtcgattagcaaaatcacgaaagaggacttatacacttgctatgagacgttctaccaccctagcaacatgttgctgttcattgtcggctcggtggacgtaaatgaaatgatggagctcgtccgggcgaaccaaagcaaaaaggaatttgctgaaccaaaaccgattgagcgccatgtgaagcctgaagggacgccggttgacagaaccgaacatgttgtcgctatgcctgttcatacgccgaaggtatttgttggctttaaagagtcaaacccaacgcgccaagggaaagaactgctaaaatacgaactgtcgttaaatgttttgctcgatcttatgttcggcccaagttccgaggcatacgaggctatgtatgaggccgggatcatcaatgagacgtttgcatttgactatactgcagaatatgggttcggtttttcaattatcggcggagacagtacaaagccagaggagctaaaagagaaagttatcgagacaattgcggcattcaagcagcgtccactagcgaaagaagaagcggatcgggccattaagaaaaaaattggcgcttttcttcgttctttgaactcacctgaaaacattgccaatgaatttacacgctatgcgtttaatggcatgaatttatttgatgtcgtgccgatgcttgaatcgttagaagcatcagatttggaaacagtgctccatcaccattttaaaagcgagtaccggacggtagcgacagtcaaagacaaagacatgtcatgaagcgcattttaataacaggggcaactggaggaatcgggcaagcaacggcagcaatccttgcacacgaggcgtctgagctttatatccactactcggaaaacatcgaggcagccaacgctctagcggcagccgttccttgtccttgtgttgccattaaagccgatttgtctagcgcagagggcgccgtcgcacttgcaaagcaactacctgccgtgcctgatgtgtttgtcgattgtgctggcagcgctgcatctgcgctcttgcaagacgttgatgacgatctccttgaagcacaaatgcatgtgcacttgcttagcccgatcaaactagtacgatcttttttgccggaaatgcttagaaaacgcgatggcgtgattgtgctcacatcctccatttgggggctcacaggagcaagcatggaaagcatctatgcggcagcaaagagcggtttaaatgggtttgttaaaagcatggcaaaagaaacggccatgagcggcatacgcattaatgccgttgctccgggagcgatcgatacaaacatgcttagaggctacaacgaggcagaccttcgtctgcttgctgaagacattccgtacggcaggcttgggacagccgatgaagtggcagaggcgattgcctttttggccagcgataaggcgtcgtacatacatggtcaaattctttctgtcaatggcggttggtactgttaagtcagcgcataaaggcaagtgaaaccggcatactaagtgtgaatctttttaaattcaaaaggagggattcacatgtcagtacttgacaactgggaacaatggaaagattttttaggagggcgtcttgaccaagcaaaaaaagagggcatgaatgaacatgtcgtcagtgaccttgcttaccaagttggcgaatatttggcagggcaagttgagccgaaaaatgaacaagagcgtgttctttccgacctttggaaagtcgcagatgagaaagaacagcatgctatcgctaatatgatggtaaaattggtagaccaacagtaaggcgcccctgcctgttcgcaatttgtgaacaggcagtttttttactaaaaacggcggtttgtttggcgatttgcggaaatttgcaattttacataggaaaatactttccttttagtagtgtatcctatatcatagacccaagaagaatagctgattttgtccatttttcacactcaagaaaggaagtgccgcggtgaaagaatggtattttgagtaccagctccatgaaaaccgcccggggattctcggggatatttcttctcttcttggcatgctgtccattaatattgtcacaattaacggcattgacgacacgagaagaggtatgcttttgcgcacttctgacgatgacagcgtaaaaaggtttaaagccatcttacatacaattggcaacgtaaccgttacaaaattccgcgagccccgggttagagaccgattggcgattcgccatggtcgctatatcgagcgaaatgccacggagaaaaaaacatttaagtttattcgtagagagctagggctattagttgattttatggctgaattaatgaaaaaagaaggccattatttaatcggcattcgcggcatgccgagagtcggcaaaaccgaatcggtagtagcagcaagcgtctgtgcgaacaagcgctggagctttatctcttcgacgcttcttaggcagactgtacggagccagttggctgaagatgaaatggatggggacaacatttttattattgacggcattgtgtcaacgatgagagccactgaaaaacaccgcatgcttgttgacgacatcatgcggctcccagcagtaaaagtggttgaacaccctgacatttttatccgtgagtcagagtatgagcttgaagactttgactgcattattgaattgcgcaatgacgatagtgagcaaattacgtatgacgtcgtcgagccaggcttttcttcatttgacataagctaaagtttgtaggtaggtgtgaccatgtcagaactagggaactacttaaaagagacgcgtgaggaaaaacagatcacgcttgatgatctgcagcgtacgaccaaaattcaaaaacggtatttggcagcgatcgaagaaggtaattttgatacgctcccgggcattttttatgcgcgggcatttgtcaagacgtatgcggaagcgattggccttgatgctgatgaagtgctggaaacgtataaaaacgaactgcccaatccgcaaacggaagcagtcgatttgccttcacgctctgaacgggtaaaaacaagcgcgcgtacagcgccttcaaggccaggaaaagggcgtggaaaatcgctggcttccattttagtgccaatcttgctcattgctgctgtcgtgcttgtcgtcgttcttatttggaatatcagcggccgtgatagcggcggcgaagttcagaatgagcaagaagccggccaaacagatacgtatgatccgcccgagaatgctggcgatgaagaaggcgaaggagcagctgacgaagacgaagcagctgacgaggaaagcggatcagaagacgagcaaacggacaaagagcctcaactttcattggaagagacatccggcaacgtctccacttatatccttacaaacgtggaggcaattgaaacgttgaaaattgaaatgggagaaggctcttatgtgcaagtccgtgaccgcgatggacaggcaatggatgaaaacggcggagactacaaagatgattttgagccagacgtgagcggtcttgacgcccttgagcttaatattggcaacggttatggggttgaaagggtggaagtaaacggccttgaagtcgaactcctggaaaccgatcaccaatatgtgaccattaccgttgaagaacaagaataacgaatcgttcccggcttagtaccggggactttttcgttgttgttgtttttgattaagcgctgtttttttcagtacggtgccaactatggtacaataaaaaagtgagtccagactggtttcatgcaaactggcaaaaaggaagggacgggaagcttttgaatttagcaaataaaatcaccgtagcgcggatttgtttaatcccggcatttatgctgtttttgcttgtcgattggccgcttggcgaaacggagtggtttcaacagccaattacatacagcatgcttgtggccacagcgatttttgtcgttgcctctgccacagattggctcgacggctactatgcacggaagcttgatcttgtcactagcttcggcaaatttctcgatcctttggccgataagctccttgtgactgctgccttaattgggttagtggaagcacagctcgtgccagcttggattgccattgtcattattagtcgtgagtttgcggtaacgggcattcgcttagttgctgcggcagaaggcgatgttatagcggcgagcaaactgggcaaatggaaaacgctcacccagattatcgctattattgctagtcttttacataatatccctttttcagctctttcatttccatttgcttccataatgctatggatcgcggctctgttaacgatctggtctggaatcgaatattttgtgaaaaacaaacacgtcattctaaaatcgatgtaagggagaggatggattgaatgcagaaataatggccgttggctcagagctgcttcttggccagatcgccaatacaaatggccagttcatctctaaacagctagcaagcattggtgtcgacgtgtaccggcacacagttgtgggagataacgaggacaggctaaaaatagcacttcaagaagcatatgagcgtgccgatctcgtcattttaacgggcggacttggcccgacaaaagatgatttgacgaaagaaacggtcgcggcgttttgtggaaaaaggcttgtgtacgatgaaaacgcgcttcatgaaattgaagattattttaaacgccataaccgcgtcatgacgcctaacaataaaaagcaagcctatgtgattgaaggctgcaccgtacttgcaaaccgtcatggcatggccccgggaatgctatgcgagctggaagacgggaaaaaattggcgcttttgcctgggccaccaagtgaaatgaagccaatgttcgtcaacgagcttttgcctaaactgttaggtgccactgaacagacagaaatcacttcccgtgtgcttcatttttttggaattggggaatcacaattagaaacagaccttttggacttgattgcgacgcaaacgaacccgacaatcgctccattggctggtgatggggaagtgaaactgcgcttgactgtcaagcatgcagataaaaatgaagctgcccgtttgcttgatgaaacggaaacattgattcggaaacgggtcggttcatatttatatggctataacgaaacgacactggtcaaggaaacgtttttgcgtttgcaggcgagcggtctgacaattgccagcgctgaaagcttgactgccgggcttttttcaagcgaattggctgcgttcgctggcgcatcccacgtgctaaaagggagcgtgactgcctactccaatgaactgaagcagcaattgcttcaagtttcaagcgccacccttgctagcgatggcgccattagcgaagcatgtgcattggaaatggcacgtggcgtcaaaacactttacggttctgatattgccatctcttttacaggagtggctggccctggggtgcaagaaggccacgaagcgggcaccgtttttctggcgcttcttttgccaggagggaaagagcgcgtatacacgctgtctttatccgggggacgcaatgccgtacgaatgcgagcggtgaaatttggctatttttatttactggaagaattgaaaaggagcaatggtagtaaatgacctattttacagactttgatatttcggaccaagtgaaacaagcaatccaggatatggggtttgaagaaccatcccctatccaagaaaaagcgattcctgccattttgacaggtggcgatgtaattggccaagcgcaaacagggactggaaaaacagctgcttttgggataccggttgtcgataaagtgactgaagagcgttacattcaagcgttaattttgacgccaacaagggaactggccattcaagtttctggagaactgcaaaagctatcggctcataaacggattcggacgttgccgatttacggcgggcaatcgatcggccaccaaatcaaagcgttgcgccaaggagtgcaagtagtgattggtaccccagggcggatgcttgaccatttgcgccgtggaacgctcaaacttaattcggtccataccgttgtccttgacgaagccgacgaaatgctcgatatgggctttgtcgatgacatcgaagcgattttaaaggaagtcaatcaagtgcgacaaacgttgttgttttctgctacaatgccgcctgcgatccgcaagctgtcacgaaaatacatgaacgatccgaaaacagtgacgattaataagggcgaagtgacggcgccttcgatcaaccaagtttattataaagtattggagcggaataaaattgactccctttgccgcatcattgatagcgatgacgtggagctcggcattttgttttgccgcacgaaaaaaggtgtcgctgaactgacagaagcacttcaagctcggggctatctcgttgatggtctccatggagacttgacacaatctcagcgtgatgttgtcatgaaaaaattccgcgactcatcgatcgagttcctcattgctacagacgtagctgctcggggcatcgatgtggaaaatgtcacccatgtcatcaactacgatattccacaagaccctgaaagctatgtgcaccggattggccgtacagggcgagcgggccggacaggcgcagcgattacgttggttacgcctcgggaaatgaagcatctccgctctattgaaaaagaaatcaagatgcacattccgtcagcgagtgtaccgacgattgaagaagtagttgaaaaacagcaaagttcttggaaaaacttaattcaggatacaattgagcaaggcggcaaagaaatggagttgttcttgccccttgtcgatgaaattcttgctgagcaagaccctaaacaagtggttgcggcactattgaaattaaagttttctacagagacggcaaccgaagatgctggctacagctttggggacacaggcggtgctaaaggaatggtccgcttcttcatcaatgttggacgaaatgtcaatttgacgccgaaaattttaggcgaagaaatcggccgccttgtcggcattcctgtcaaatcgattggccgcatcgacatctttgaaaacttctcctttgtggacgtaccagaagaggcggcgccatttgtgtatgaaggcttgcgctattcccgtattaatggagcgcgcgtcaaccttgaacctgctaagcctcgcccgaaacgggagcggcgcacgccagcagggtcgcgccgttcatagacctttagccaaagcgtgctgctttgtccaccacacgtagtatttgcagtcggaaagaccgggttccgcccggtctttcctatttgtcgtaaaaaaagacgaataaatgttcgtaaaaactattggcaaacgaagcaaaacacgttatgatagactcatgcgaagacttacaacattgtcccttacatggataacgatagaaatgagcgaatcgacaaggagagatgaaaatgagtgatagaaaacaagcgcttgacatggctttacgccatattgaaaaacaatttggcaaaggctctattatgaagctaggtgaacaggctgaacagcgcgtatcgacggtatcaagcggcaccctcgcccttgatattgctttgggcgtaggtggctatccaaaaggaagagtcattgaagtatatggaccagaatcttccggtaaaacaaccgttgctctccatgcaattgctgaagtgcagcgcaatggtggccaagccgcttttattgatgctgagcatgccctggatcctgtctatgcgagcaaactaggcgttaatatcgatgaactcttgctgtcccaacctgatacaggcgaacaggcacttgaaattgcggaagcacttgtgcgcagcggtgcccttgatatcattgtcattgatagtgtagctgcgcttgtaccaaaagcggaaattgaaggggaaatgggcgactcgcatgtcggcttgcaagcacgtttaatgtcacaagcgctacggaaattatccggagcgatcaataagtcgaaaacgattgcgatcttcatcaaccaaatccgtgaaaaagtcggcgttatgttcggcaatccagaaacgacgccagggggacgcgcccttaaattttactcgtccgtccgcttggaagtgcgccgtgccgaggcgttaaagcaagggaatgagattgtcggcaaccgaaccaaaatcaaagtcgtcaaaaacaaagtcgctccgcctttccgtttagcggaagtcgacattatgtacggagaaggtatttccagggaaggttcgatgcttgacattgcctcggaactcgacattgtcgaaaaaagcggtgcttggtattcttacaaaggcgaccgcctcgggcaaggccgcgagaattcaaaacaatttttgaaggaaaacccggaaattacagccgaaattgagcgtttgattcgtgaccaccacgggctcgacggggaagcgaagctggaagaggcagctgaagaacaagcttttgaagatgtgcctttagatttaaaataaagagaacaacattgaggctcccgaacagagtccgctgatagacgcccatacaagaggaggaaagatctggcctgcgccatgttctttcctctgtatttgaaaaacacgggatttcagcggctgcaaccgttgagggggctttttttatagaaaaaaagaagtttcacttgcaaaaggagccgacgggataaaatggtcacgtttttatattttaccgatacccatatccgggggacagcgcctaaaaaccgtttagatgcgtttccagaaacaatgaaacaaaagctcacagaaataatggctatcgccaaccgtgaacaagtagatgtgctcctccacggtggtgatgtttttgacaggcctgacttatcgccaagcacagttggccaattcgcacaaattttccgggaagcgccggcgcccatatacacgattgccgggaatcatgatacatttggtcataacccggagacggtgtcacggacgatgcttggtctccttgatgcgtttggcattatgaagctcgtccatcctggcaagccgattttgattgaaaaagctggcgtccgcgtgcaagtgtccggccagccataccattatgaactcgaccagcgtgaccctaagctagactactacccaattaatgaaacagaagcagatacgatgatccacctcgtccatagcatgctcgtcgaaaaagcactgcctgagggcattcctcatacgctaattgaccacatttgggggacgagcgccgacgttattttgacaggacattaccatactggttttggcattaaagaacaaaatggcaaatttatttgcaatccaggggcaatagcgaggattaataaccattggacagaagtagaacggctgcctaaagtcattattggtactgtgacaaaagaaggcataacgctacgggaagagacgctgactgtcgcccaaaaagggagcgacgtgttggacagggcttatgtggaaaaagcaagccaccaggaagaaaaactccacgcctttgtccagcaagtgagagaacaggccgatttccaaacgctgcaaatgagtgaaatcattcgcgagctcgcctctatgcaaggtgtcgaagacaaagtaaaacaggaagcgctaaggcggatgacgatcgtggaagaacgctgggagcgtgatgaaactgaataatattgtaagtgtcaggcttgaaaatttccaatcccatttagatagcacgctgcaatttgacaaaggcttaaatgtgatcgttgggcaatctgacagcggcaagaccgcgatcttgcgggcagttcgttgggcattgtttaaccagccaagggggaccgattttatccgtgtcggtgccgattttgtccgtgtgaccatcacaatggactcagggcgtcttatcatacgcgagcggacaagctcaaaaaatcgctacatcttaaaagagccaggaggagaagacttggtgcttgaagggttcggcagtcaagtgccagaagaggtgctccaagcccatggcatgaggccgttccggattgatggcgataatgagtggcatttgcaaattgcccagcagttagacgggccctttttgttggaagcgccaggatcgctgcgcgcgaaaacaattggccgcatgagcggtgcccactatttagacatggcgatccgcgatgcctctaaagatgtgtacggactcagccaacgaattaaacagaaacaagcagaagtggaggaagccaaaacggcgctcgccccatttgatgggcttgaggcggcgaagacgaaactggacaaaggctttgaaaaattgcggctagccaaggctgcccaagatagactggcgaagctaaagcaatggcatgcccgttacatagagctgacaagagcaaaagcagaagccgacaaacaaaaagacagtgtagcccagcttgctgattgggaaatccgttatgaacggttgtgtgcgctagccgttacaaacaagcgtctgagccagttggcggaacaatgggcacggctcgaaaaagacagcagcacctgctctttatggctttcaaaaacagcgcaagtagacagtgcttatagccttcaccaggagatacgaaacgaggcaactcgatatgtgcgtctgaccactcttaagcggcaaacccaagcaataaaggacaatgagcaaacattgacaaaggcaatggcgcaaacagcttttgtgcaaagcctagacaggaagcaacttgtacgaatggaagaggagaaagtcaaaaaagatcggctcgaaaaacttgcccgccagtggcagcaaacgcagcacgaatatacatcagtcaaggctaccagtgcagaattgaaagggacagaccaagcagcccggcagttaaacgaggcgattgaaacgacgaagcttttaataaagttaaaggattataaaaggcaattagcagaagtgacaaaacgtgctgctgacggacaagcatttgtgaaagaaaagctagctgaagaaaagcagttgagcgatcgttatacggaaacactaaaagcgcttggcatctgcccgacgtgtgggcaagcgattaatcatggaggggagcatcacggatgaatagtgtagaacaagacttggaaaaaatgaaacaagcaattgaaaaggcgaaagacgtccgttaccgggctgaagcaaagcttgaagagttagagaatcaaaagcaacggctgttagttgaattagaggaacttggcgtgaaaccagaggagctcgaacaagagattcaacgtttagaagatagcatcgcacgttccatggatgaagcatggtcccttattccgaaggagcttgttagccgtgagcagtgaacgggagctggagcagttagaaaatgctttccaacaagcgagagaccaatggatgcgccttgatgaaaagaagcggatgttgcaagagcgacttgaagcagctgaagcggaacttgtgcatatggaagacacggtcgatacgtacgaaaaggcgcgcgttcttttgcaacaatctgcagaatatgccagggagcaggctaagcaacaaatggagacgctagtgacaaatgcgctccagtacgtatttgggccgcttgtctcatttgaaatcgaattagaagagcacggcaaccgtgcagttgcggacatgtacgtcatttctgattacgaaggcattcgtgtgaagacgaagccccaagacgctagaggcggcggcgttgttgacattgtgacgttggcgctccgcgttgctttgatggaaacgacacagccgcgccaggcaggtccgctgttgcttgatgagccgggcaaacatgtttcaggtgagtatacgcattacttatacgaatttttaaaatcgctggcaacgatgtttggacggcaaatcattatgatcacccataaccaccacttagccgaatcaggcgacaaagccttttcagtgtccattcgcgatggacttagccaaatagaagacatttccaaaccttgacatcgcctgcgactgagcgtagaataagaaatgatacagtgtgtaaaaaaggctgtattttatgtaagtttgacctgtaatttagcaaacgtgaatgcaccgttaaaaccaacaattggatagcaagggaggtgaaacgatgccaagttatacgttgagtctcttggttctctgcctcattgtacttgctttctctgtagtttttgcagttgttggatatcttgttcgaaaatcagtcgctgaagcgaaaatatcaagtgcggaacacgcagcaaagcaaatgattgatgacgccaagcgcgaagcagaaacgaataaaaaagaagcgattttggaagtgaaagacgaagtccataagcttcgtagtgaagccgagcgtgaggttcgtgagcgaagaaatgagattcagaaacaagagcatcgtttggtccaaaaagaagagattctcgaccgcaaaagcgaaactctcgataaaaaagaagaatcgttagaaaaacgggaggaatctctcgccaaaaaacaacgacaagttgaagagatggaaagtaaaatgagccagttgcttgttgagcagaaacaggaactggaacgagtatctggattgtcacgggaagaagcccgaatgatcatccgacaagaggttgaacaagaaattgcccatgaaacagctcttttgattaaagaaaagacagccgaggcaaaagaaacggcagataaacgctcgaaagaaattttgtctcttgccattcagcgttgctccgctgatcacgtggccgagacgacggtctctgttgtcaatttgcctaatgatgaaatgaaagggcgcattatcggccgtgaagggcggaatattcgcgcgttagaaacgttgacggggatcgatttaattattgacgatacgccggaagcggtcattttatcagggtttgatcctattcgtcgcgagattgcccgttctgctctggagaaacttgtccaagacggacgaattcatcccgctcggattgaagaaatggtcgataaatcgcggcgcgaggtcgatgaaacgattcgcgagtacggcgagcagacgacatttgaagtcggcgtgcacggcctccaccctgatctcatcaagattttgggcaggctgcgcttccgtacaagctatggccaaaatgtcttaaagcattcgatggaagtagcccacctagcaggaattatggcagcagagcttggtgaagacgtgaagctagcaaaacgagcaggccttttgcacgatatcggcaaggcgattgaccatgaagtggaaggcagccacgttgaaattggcgtcgagcttgcgacaaaatataaggaacatcctgttgtcattaatgcaattgcttcgcatcatggcgacaccgagtccacgtcgattatttcgacacttgtcgctgctgcggatgcattatcagccgctcgtcccggcgcaagacgggaaacacttgaaacgtatatacgccgccttgaaaagctcgaggaaatttccgagtcgtttgatggtgttgaaaaaacgtttgccattcaagctgggcgtgaagtgcggatcatggttcggccagatgtcgtcgacgatgctttggcccataaactagcgcgtgacatcacgaaaaaaattgagcaagagcttgattacccaggtcatattcgagtgactgtcattcgcgaaacacgtgctgtggaatacgcaaaataaagtggcgaaagccactttatttttttgaaatttgtttggaaaagagggattcccttgaggattttatttattggcgacgttgtgggctctcctggccgcgacatggtagaaacccatttgaaacgcttgaaacagcattacaagccgactgtcacggtcataaatggcgaaaatgcggcacatggtaaagggattacagaaaaaatatataaaggctttcttgatttaggggcgcaaatggtgacgctcggtaaccatgcttgggataaacgggaaatttttgatttcattgaagacgcgaaatggcttgtacggccagcgaacttgccgccgaccacgcctggtgtcggcttccgggtgatgaaagtcaaccaattgaatgtcgccgtcatcaatttgctaggacggacgttcatgaatcccgctgattgccctttccgtacagtcgatcggattttagaggatattggcgccggagcagattgcatatttgttgattttcatgcagaaacgacaagcgaaaagcaagcgatgggctggcatttagatgggcgcgtcagtgcagtgatcggtacacatacacatgtgcaaacagcagatgaacggatattgccaaaagggaccgcctatttgtctgatgttggcatgacgggtcctttagacggcattcttggcatggaaaaagaagccgtgctgtaccggttcctgacgaatttgcctgcgcgttttgaagtggctgaagggcgcaaacaattaaacggtgttgtgattgatattgatggccgcactggaaaagcagagaaaattgagcgcctttccttttccgatgaacgtccgtttatggaaatatagacaaatttgtgtttacgaggcatatccctcctatttctttaatagacatgtgataaggcgttggcctgttaattgacaacttgaggagacaacgatcgaaccagcccgctttattttatttgaggaggggtagaaatggaagtcttaaaggtttcagcaaaatctacaccaaattctgttgcaggcgcgctcgccggtgtcatccgggaacggggagcggcagaaatacaggcgattggcgcaggagcattaaaccagtccatcaaagcgattgcgattgccagaggtttcgttgctcccagtggaatcgacttggtctgcattcccgcgtttacagacatccatattgacggagaagagcgaacggccattaagctgatcatagaacctcgtagctaaaacaggctgctgcatgaatacacgtgcagcagcctgttttgctttttagtaaaagtggatacgctcacccatttccacgacgattgcatccaaaagcccagtacgtggcgtgtagccagtagcggagaatgtacgcaccaatttaaagttaagacgtgttacttggtcgagcaagtaagcggacgtttgcgagcctgggatgcgttgctcgtttaaaatacggatgatttcggcgctcggttgaatcccaatcccatggccaaagtacaagtcacgatcaagcttaatcgcgttttcgccgcgccagacggaattgtacggggcaaaatcgggattgttaaagtaaacacagtcgccaatacaataatcggttccttttcttgtcactagctgcaagtcttcgtcgtgttcccatgaatacaaatacagcccttggaacaaccggtcaaacgaaggacggtcaatcgaatcgagcactgccttataaaaaagaatgataatggcagtggcgcattcaaatccgtaggctctgccatttaaaaagatatcgttgatcgcatcagacggcctcacagaaggttttaactggaaggcgccattaggcatacgctgccaaaagcggggattgcaataggactgttgaaaggactcgaatgaggcgccactatgaaacatggcgattgatgcttcgactgtatgtaagcgcaaagcaacctcaaagctgagttcatcaacggattggtagcggtaagtggcgttgctttcaagcaaacttgttagaatggcgcgttccgcttgggatagaccgtggctcggtattgtctgcaacggctttcctgcaatttcaatcattggaccagctccctttatacgattattaaaacctatgcggcaaaagggacgtacagccctcctttttatagccagggctagcgctaacattgctttcaaataagattgccgcgaatcggctctgttccattgttttctaaggatgagacacgtataatatgggaggaacgttttgtttgcatggaaggggattttacaatgagtgatcaaaacaagacgaaagattacagcaagtattttgattttagcgatgcacgcgttgtttctgaagacgacgagaaaaaaatcattaaaataaaaggccgggaaattaccatatacgatcagccgaattatcgggcagggcgaaagagaaaacgcgaagacgtgcaagtgcttcgtcccgaaaatttgatccccgaagaggttgccaaccttggggcagggaagaaatttttaattcgaacatacggctgccaaatgaatgtccacgattctgaaaacatgtcaggtcttttgctcggaatgggttttgaggaaacaaccgaaacagaagaggctgatatcattctattaaacacatgcgcgatccgtgaaaacgcggaaaacaaagtgtttggcgaaatcggcaacttgaagccgcttaaattggaaaagcctgaactgattattggcgtatgcggttgtatgtcacaagaagaatcagtagtcggcaaaattatggaaaagcaccagcatattgatttgattttcgggacacacaacatccatcggttgcctcatttattacgggatgcgattttcggaaaagaaatggtcatcgaagtgtggtccaaagaaggcgatatcgttgaaaacatgccacgctctcgcaaaaataaaacacaagcatgggtaaacattatgtatggctgtgataagttttgcacatactgcattgtcccatatacgcgaggcaaagagcgtagtcgcttgcctgaagacattatagccgaagtgcgtgatttggcgcgccaaggttacaaagaaattacgttgctcggccaaaatgtgaacgcctatggcaaagatttgcctggctcttatcgacttggcgacttgatgaacgaaatccataaaattgatattccgcgcgtccggtttacgacaagccaccctcgtgattttgacgaccatttaattgaagtgcttgcccaaggcggaaaccttgttgaacatatccatttaccagttcagcacggaaactctgatattcttaaactgatgggccgcaaatatacgcgtgagcaatacattacgctggcaaataagatcaaacaagcgattccgaatgcttcctttacaaccgatttaattgtcggcttcccgaatgagacggaagaacaatttcaggacatgctttctctcgtggaagaaatccaatttgatgcagcgtacacgtatatttattcgccacgtgaaggcacaccggcagctcgaatggaagacaacgtcccgatgtctgtgaaaaaagagcgcttggcccgcttaaatgcccttgttaacgacatttcgaacaagcgcaacttggattatcaggacaaaattgttgaagtgctcgtagaaggagaaagcaagaaaaatacagatgttcttgcgggacgcacacgcacaaaccggcttgttaattttgtcggaccgaaatcagcaattggcgagattgtctatgtgaaaataacagaagcgaaaacatggtcattagatggagaaatcgtttcggcgcctgaggtgaaagcacaatgacaaagttgtatacaagacaggaaatcaaagacaaagcaaaagaactggcaaatatgctcgcacggacagaggaagttgattttttcaagcgcgcagaaaagaaaatcaatgaacatcttcgcgtccaggaaatgattgccgacattaaacgctaccaaaaagaagccgttaatttgaagcattacgggaagacggaagcgttaaaagaagtggaagcgaaaattgataaattgcatgatcaaattgatgagattcctcttgtgcaagaatttaaacggagtcaagttgaagtcaacgaattgttgcaattaatcacgaacaccgtgtctaaaaccgttacggatgaaattatccgttccatggatggcgatgtcatgcgaggaacgacgacgaaaagcccctttcatcactgttaacacgcttgttgttttgcgctctgactgatcaaaaacgcttggagtgcagccaagtgaaggtgcgaatagaatggggttcataaggatatgagtgaggcaaacgacgacatatgcgagcgtttgtctatagtctgaacacggcagcaatgccgtgtttttgttttataggtctaaacagggtcagtgattcatagcttggtatagagacgtctaggcgtaggggcgttgcacaacacgatgagcggatgtgggcaatgtaaaaaacaaggcgaatgtctcttgcaataggcaaaatgaaaaatgggaggtacacgatggctgactcaaaaaatgaaacgagttatcgcgagattattacgaaagctgtctgcggcaaagggcgcaaattttcagaagcgacacaccatatccgtccaccagagccaccgtcaagcatactcggctgctggattattaaccatacgtacagtgcgaaaaagcgtggcgatacagtcgaagttaatggcagctatgacattaatgtatggttttcgtataccaataacacgaaaacggacgttgcaacacaaacggtttcttataccgacctcgtgcctttaacaatgaaagatgacaatgtgatttccgaagaattggaagtgtatgcgaagtctgtgcaacagccgaatacgctggaagcagtcatttctgaggacggccgcagcgtcgatgtccaagtcgaacgggaatttattgttgaatgcattggtgaaacgaaagtggcagtagcggtcaatccacaagggcttattgaagaatacccgattgactcacttactggcgaaatccgcgacgaagagtttgagcaaattgatccaaactttttacaagaagaaatcgaccgataggaaaagccggctcgctttttggagagccggtttttttccgttaaattcaaggaaatcaactgtcttcctatggtataatagcgattagattttcaacatatcggaggcaatttatggcacaaatgcatacccccatgatgaaacagtacttgcaaattaaagcaaagtaccaggacgcctttttatttttccggttaggcgacttttatgaaatgttcaatgaagatgccattaaagctgcccaagaattagaaattacgttaacgggccgcggccaaggcgaagaccgaattccaatgtgcggggttccgtaccactcggctgattcgtatatagcccgcctaattgataaagggtataaaattgctatttgtgagcaagtggaagacccaaaaacagcaaaaggcgttgtgaagcgtgaagtaacaaaagtattgacaccaggtacgctaatgaatagcaagttgttagcagaaaaagaaaacaactatttgcttgcctttgccagcgaaggggaggacgggtggggcattgcccgttgcgacctttctacaggcgaaagcgatgtaacattgatcagaggagggagcgcagagcttctccaagaaattgcagcaagtggcgttaaagaagcgattgcaccggcagggctcgaagaagaactgaaagcgaagcttggcgaacagcaaggttttgttgtgtcctatgaggaacaagaggacgtgcctaaagaatatgaacggcttatcaaccatattcaacagccgttgctgaaacgagcttacggacgcatgctccattatttactagcgacacagaagcaaagcttgcgccatttgcaacaagttgttttccatccggctgattcctacttaaaaatggatgtccacgcaaaacggaatttggaattagtgcaaacgttgcgtgataaaaagaaaagtggctccctccttgctgtgattgaccaaacagtaacagcaatgggcgggaggctattacgccaatggattgaacggcctttagtggacaggaaagcgattgctggcagacaggcagtggtagaagcgtttctggaacatttttttgaacgggagcaattgcgcgattgtctccgccaggtttacgacattgagcggttagcagcccgtattgcttacggcagcgtcaatgcacgggagcttgtgcaattaaagcgctcgctgcaaaacattccggagatcgaggcaacgctggaacaagtcggccttggcggacgttggttaaatcagtctgagcagtttgctgatttggtggccttgatggagcaaagccttgtcgatgatccgccgctctcattaacggagggtggccttattgtagatggttataacgaagaactggatgcttaccgggatgcgagccgcaatggcaaacagtggattgctgaacttgagcagtctgaacgcgaggcaacaggcatacgctccttaaaagtaggctacaaccgtgtatttggttactacattgaggtaacaagggctaatgctcatttgctgccagacggccgctacgaacgcaaacagacgcttaccaatgctgaacgttacataacgccagaactaaaggaaaaagaagcgctcatattggaagccgatgaaaagctcgctgatcttgaataccgtttatttgctgacatccgtaaacaagtggaagcctatgtcgccagcttgcaaaagcttgccgccgacattagcgaaatggatgtgctcgctggttttgcctctgttgccgaacaaaacggctatacgaagccaaccatcactgaaagccgcgatgtcgccatcaaaggcgggcgccatcctgtcgtggaaacggtcattaaacgaggcagttatgtagaaaatgacattgatttaaccggcgacagagatatgctgttaattacggggccgaatatgggcgggaaaagcacctatatgcgccagcttgctttaactgtcgtcatggcgcaaatcggcagctatgtccctgctgcggaagcaacgctgcctttgttcgaccaaattttcacccgcattggtgccgctgacgaccttgcaagcggccagagcacatttatggtcgaaatgttagagacaaaagacgcgcttgtgaaagcaacaccacacagcctcattttgcttgatgaaattggccgtggtacgtcgacgtatgacgggatggcgctcgcacaggcgatcattgaatacatttatgaaaccattggcgctaaaacccttttttcgacccattaccatgaattaacgcggttggccgattccctgcatacgttgcgcaatgtccatgtatcggcagtagaggaaaatgggacagtcgtgtttcttcatcaagtgattgaaggcgctgcagaccgcagctatggcgtttatgtcgcagaactggccggtttgccaaagcaggtgacaacgagggcggaggcgcttttgactgagttggagcatcttccacaaaggccgacaagtgcttcagtagagcaaccagtcgatagcgcaaaaacagaaacagcagcaacggccgaagaaccgcagcaactctcgctctttccgactgatgaagaaacaaagccaaagcagccaacaaaaaaagagcgttcggtactggcgaaaatggctgaagtcgatgtgttgcacttgacaccgttacaagcacttgaaaagatcaatgagtggcaaaagcagctaaacaagtaaaaaacgaaaaaaggggtggagacgatggccgttattcaacagcttgacgatgcgctttctaataaaattgctgctggcgaagtcgttgaacgtcctgcttctatcgtcaaagaacttgttgaaaatgcgattgatgcaaacagcagccagattctagttgaaattgaagaaggcggcctttcgtcgattcgcattgttgacaatgggacaggcattgagccgaatgaattagagttggctttttctcgtcacgcgacctctaaaatcaaaacggaccgcgatttgtttacgatttgcacgctcggttttcgcggcgaagcgctgccaagcatcgcctctgtctcccgtgtaaacatgcaaacgagcacaggaagtgcaggcatgcaagtcgagcttgagggggggaagatcgtccataagcagccctctgaagcacgcaaaggcacaaccattgtcgtcactgatttgttttacaatacgcctgcacgcctaaaatatttaaaaacggttttaacagaggcggggcatgtgagcgaagtcatgaaccgcatggcgttagcatacccgcacattcgttttcattatgttagcgatggcaaaaccgtgctgaaaacagcagggaacggcgacttgcgccaagtcattgcccaagtgtatggccgcaaaacagcagaaaaaatggtccccattacgggttcatcgttggattatgagctaagcggctatatcgctaagcctgagttgacacgagcaaacaggcagtatatgtcgattttcataaatgggcgctacatccgcaactttaagttggcaaaagcgatccaacaaggctttcacacaaaactgccgattggccgctttccgattgctgttctcaagttggaaatggatccgacgctaattgatgtcaatgtccatccggctaagctggaagtacgcttaagcaaggaagaagcacttagcgaaatgattgccgaaagcattaaaaaggcgttaagtgaagaaacgctcatacctgagccgaaaaaagaaaacacagctaaaacaaaaagcgaacagctctctttctccttagcgtacgagttgcaaccagaaaaggagcatgtgcgcgagacgatgcaacagccgcgccagctagctgccgacgaccaagttgatcgcaaaaaggaaagcacaagcataggcaacagttggtcgccatcacatcagcaagaggaggaagtcgaacaaggaagaggcagcaatgccagtatacctcctcgaaatgaacgggtggaaaccaacacagaagaaaaatatgagcaggcggatagaagaacagacgagtcccttccaatggaaatggaagaggaggcggctgtagtcgagccacaactgcctttaggcaacgatgcagaggcaaagggagcgatgccgcctttgtatccagtcggccagatgcatggaacgtacattgttgcccaaaacgaacaaggcatgtacttaattgaccaacatgcggcacaagaacggattaaatatgagcatttccaccaaaaattagctgaaccattaggacagacacaagagttgcttgtgcccattacacttgagctgacaacgagggaaacacttgttgtcactgaatcgaaagaaaaacttgaagccgtcggcgtatttttagaagaatttgggaaaaatacatttgttgttcgttcccatccgacttggtttcctcaaggcgatgaagaatcgacgatacgagaaatggttgagcagcttttggacaataagcggattagcattggcgaattacgcgaagaagcagcgattatgatgagctgcaaagcggcgattaaagccaatcgccatttgcgcacggatgaaatgtttcaacttctggaaacgctgcgccgttgtcaagagccgtatacatgtcctcatggccgcccggttgtgatccacttttcaacgtatgaactggagaaaatgtttaagcgcgtcatgtagaggagagacaaaaaaacgtgatcgttacgaccgcaagaaaacaggccaatgccttaaaagaaaaagcagctttgtgtgctgctaaacttggtgctcgttttgtcgagcgtcaggaccggtctcttgaagcactctttgccgcttacggcgaagatgtatgcattgttggaaaagaacggcaaacgctttacaaatataaggaggcagtcccgtttttttatcacccaaatgcgtcgtttatccgttacaaacagtggcagaaaacaggaacggatccttttatcgacgctgccggcttgagcacgggcgatgaagtccttgatgctacacttggcatgggcgcagatgcggtaatggctgctattgctgtcggcagaacaggaacagtaacgggacttgaagcgagccagccaattgcccatattgtggcaaccggcttaaaagagtggcaggaaggggacgaaacgttcttgcaggcattacggcgagtaaacgttgtgaacacaggcagcgctgcctatttccagcatatgaaagacaaatccgttgatgttgtttattttgacccgatgtttgagacgaaagtcgcttcacctggactcgaagggctgagacattttgcctgttcggagatgttgacgaaatctgttctcgacgacgctaaacgggttgcaaggcgtgctgtcgtgttaaagggccactggcaaagcgagcaatttgcccgatttggttttaccgtcaacagaaggcaacatgctactttccaatacggcgtcatggaagtctagcatggatttggatggaaaggaggatgcctatgacgcaagaaccgctcatcgcgattgtcggcccaacggccgtaggaaaaacggcccttggcattgaacttgcgaaaacgtttggtgctgaaattataagcggggattcaatgcaagtgtaccggacaatggatattggcacggcaaaagcgacagtcgaagaaatggctggcattccccaccatttaattgacatccttgagccaggagacacatggacggtttccatgtttcaggaaaaagcacttttggcgattgcttcgattcgcagccgtggcaaatggccgctattagtcggtggcacaggtctttatgtccaagcgcttacccatgaattgtcttttggcgatgcgccatcggattcctcattcagggaagaaatggaattgtatgccagtcgtttcggcaacgctgcactccacggaaagctagcaaaagcagacccaaacgcagcagaagcgatccacgccaataatgttcgccgtgttattcgtgctttagaggtgatccatcttacgggaaaaccattttccgaacaagagaacggccttgcgcggcctcgttttgacaatgttctcattggcttagaaatggaaagacaggcgttgtatgagcggatcaaccgccgcgttgatgcgatgatggaggcgggcttgttggaagaagttcaccgcctttatcaacggggaatccaaggccaggccattcaggcgattggctacaaggaactatatgcttattttgatgggaaatgcacctatgacgaagcaattgaagctctgaaaaccaattcacgccgctatgcgaaaaggcagctgacttggtttaaaaaccggagcgacgctgtctggtttcatttggaggagccagaggccaaggcaaaaatttttgattatgtccacgcatttttagcaggaaaagggtttgcttaaggcgaatcagtaaaggaacgatgtagagagaggagtcagccaacatgaaagcaacagtaaatatccaagatcagtttttaaaccaattgcgcaaagaatccattccggtaacggtttttttattaaatggatttcaattgcgtgggcaagtaaagggatttgataactttacagtcattgtcgaaacagaaggccgccaacagcttgtttacaagcacgccatttccacatttgccccgcaaaaaaatgttcaattgaaaaacgaagcggaagtataaccgctttttgcatagcaaccataaaaacggttctttccaaggacgggatgaaaacaacgattttcatcccgttttttagttgtctaaaatgctctttataaagccagcttgctatgaactacttagatgggagtctgcctcagtttctgcagctgtcggaagaagctcttgtcttctagcaacgttcattttttcgaccgttaaagcatagcgccgcaaggaaagcatgctttttagccctgctttttgctgaatcgttgtccactgttcccctgcgagcattaacttgagcaaaaaggaatgacgaaaatgctgagcggagatgcctttgcgcaagccagcccgcgccacttctgtgcggatcattttctgcaaggcaatttccgtcaacgctttaggcgcgtcgttttcataggaccaatggtatgtgcgccttgtaaaatcaaaagcgacaaacaatgggtcatccgtgtgtaaacgtggccgtaccggttcagggataagcgtccaataagcatgcaactgcttggcgtatttggggcaaagtacaagctgacggtcgtggccgctgtctctgcgaatgagcaacgtcccttttacaaaattgacatcattcatttgcaggtcacaaagttcttgcaatgtgaggccataatgggcaagaagcaaaaacatcgcaaagtttcgttttgtcagttgcggccttgcaagcagctgattgtccgtcaacccttcttctgattgacttgaacgcaagatcgcagcgatctccttcgcattgacccattcgtgaggttgaagcggctcagcctctaaaggcggtgggtcataggtgaggagtggatgactcgccagctgtttttctgccattaaaaaggcggtgaattgcctgagtacggaagcgacgcggcggatggttcgtgtttgataggaacgactctctatcaattcataaaagtaacgctctgcatccgtttgctccatagaatggaagtctttatcgtcgagccacttgaaaaagtcaagcaaatcatagcggtaacgcctaacggttgacggccgccgtcccttgtcagcaagagcatatgtgaagcgctctacccattgaaacccatccatacaaagccccccctttcaagaaaattgtaccaaatccctccagctccgtcacgaacagataataagtcatttgctttgcaaagcgaagtacttgctcgaacaattgctccatatagtaaaaggggaacgtcttttcagtggatgggcatttgtcacgttttttatcctttttgcgtatagtagcaacaaagcaagagccgcctgaggcaggctgctgaaggggggaagatgcggtgagcaatccgcttgaaacgaaaaacagtgctagaatcaatgtggtattaaataaagttcctgtaaaacgagcgagcacagactggtttgtttctccagaagaaaaagaaaagcatgaagtgctgacgaagtttgaacagaagctgtcagcttatatcggcttggatgagattaaagcgttaatccaagagctctatgcatggatttatgtgaatgaacgccgcaaagagcgcgggcttaaagcgacaaagcaagtgcttcacatgatttttaaaggcaatcctgggacagggaaaacgacagttgctcgcatcgttgcttcttttttacacgaaatgaatgtgctctcaaagggccacttactggaaatggaacgtgctgatttagttggcgaatacattggccatacggcgcaaaagacgcgggaagtgctgaagcaggcaagcgggggcgtgctctttattgatgaagcttattcgttgtcacgaggtggggaaaaagacttcggcaaggaagcaattgatacgttggtaaaaggaatggaaaataattccaatgactttgtgcttatcattgccggctattcaaaagaaatggattattttctatcattaaaccctggcttgccttcaaggtttccgatttcaattacgtttcctaattataacgttgacgagttgatggaaatgttaatcggaatggcaaaagaacgagattacatgctgtcggaagaggctttgcaagaatgccgcgaacatattcgcaaagttgcgtctgaacaggaaaggacatttagcaatgggcgctacatccgcaatatggtcgaagaggcaatccgccagcaagcggtacggattttaaaacaaaacgattataggaaaacagcgatggagctgctgaaaaaagaagatttccagtttaaacataaacgctttatgtaacactacccgtgcgtctattttgcggtgcttcgttttccgtttcctttctagcttatcacgtggtaagctagaaaggagacagcagagtaggagagaacaaatcgtgacagagtttttattcaacgaagaaatacaagaaaaaatcacccgagctgaaaaacggattgcggctcatcatcaagaaattgatcgggttgctttaatcaaccaaaaacgggtaatggatagttttgcgcgccatcaagttgctgattttcacttcagcccttccaccggttacggttacgatgatgtgggcagagacacgctagaagccatttatgctgatgtcttcgggggagaagcggctcttgtcaggcaccaaatcgtctcaggcacccatgcaattgcgattgctctatttggcttgttgcgtccaggcgatgaactgctttatatatcggggaaaccttatgacacactggaagaaatcgtcggcattcgcggccatggctctggctcccttcgtgattacggcatttcttacaacatggtgccactaagagaagggcgcatggacaagcaggcgatcaaagaggcgatctctgaaaaaacaaaagtaattggcattcaacggtctaaagggtacggcgatcgaccttcgttccatatcgatgaacttgctgatgtgatcgcatttgtcaaatcgattaaacaagaagtgctcgtatttgtcgataattgctatggtgagtttgtggaaacaaaagaaccgtgccacgttggtgctgacatcattgccggttcgctcatcaagaatccaggtggcgggctggcaaaaacaggtggctacttggttggtcaaactcaagcaattgagctcgcttcctatcgcttggcggcaccagggataggggcggaagggggagcgacgttagggacacttttagacatgtaccaaggctttttccttgctccccatgttgtcgcccaaagtgtaaaaggcgctgttttcacagctgctttgctggaagaactcggtttagaaacgagacctagctcccaagaacggcgcactgatttaattcaagccgtccatttcaaaacgggcgaacaaatggtggcattttgccaagcgatccaacaagcatcgccagtcaacgctcatgtaaagccacaaccaagctatatgccaggctacgccgatgacgtcattatggcggctggcacgtttgtccaaggtgcaagcattgagctatcggccgatggcccactgcgccccccgtatgccgcctacatccaaggtgggctcacgtatgaacatgtgaagctggcggtcagtgctgcttgtgaaaaaacgtttatgactgaaaaagatcgggaaaaagacgaacagagcccatcaggtaataaagagagcaaattctgatgtaacttcgcaaaatcgggtaaaggcgccaggcaatgcttgacttcaaaataagcctttagtacgatactaaaaaagatagacgcgaaagaggcaaggaaacaacgaagcagactcgcaatgggccttacgttgtttggcgagcctttcacgaacgagtggatgaatggcttgggaacaggggatatccccctttctacatagatgaaaaacgagaggagaaaaaccacgcatgccaaagtttacaaaagaagatattgtccgccaagctcaagataacaatgtccgctttatccgcctccagtttaccgacctgctcggaacgatcaagaacgttgaaattccagttgatcagctatctaaagcgcttgacaacaaaatgatgtttgatggttcatcaattgaagggtttgtccgcattgaagaatcggatatgtatttgtaccctgatttagatacatgggttgttttcccatggacgccggaaaaagggaaagtcgcccgtttgatttgcgacatttaccaaccaggaaagccaggggaggagccaaagccgtttgaaggggacccacggggcattttaaaacgtgtccttaaggaagcacaggaacttggctttactgatttcaacattggaccagagccagagtttttcctctttaaaaatgacgagaaaggcgagccgacacttgaactaaacgaccgcggcggctattttgacttagcgccgacagacctaggtgaaaactgtcgccgcgatatcgtgctggagttggaagatatgggcttcgaaattgaggcatcccaccacgaagtcgcccctggccaacacgaaatcgattttaaatatgcggacgctgtctctacatgcgacaacatccaaacgtttaagctcgttgtcaaaaccattgcccgtaagcacggtttgcatgcgacattcatgccaaagccgctgtttggcgttaacgggtcaggcatgcatttgaacatgtcgctatttactcaagagggcaacgctttttacgacaaaaacacagaaagccagcttagcaaaacagcgatgcaatttttaggcggcatccttaagcatgcagaaggctttactgcgattaccaatccaattgtcaattcttataaacggttggtgccaggctacgaagcgcccgtgtacatcgcgtggtcgatgcggaaccgctcgcctcttgtccgcattccatcgtcacgaggggtatcaacgcggattgaagtaagaagcccggacccatcggcgaacccatatttagcgatggcagtaatgctcgcttcaggccttgacggcattaaaaagaaaatcaacccgcctgaagcaacggaccgcaacatttatatcatgagcaaagaagaacgcctggatgaaggcatcaaagatttgccatcaacattaaaagaagcgattgacagcctcctaaaagatgaagtgctcgtcaaagcactcggcgaacacgcgctagaacattttgtagaagcgaaagaaattgaatgggatatgttccgcacgcaagtccacccgtgggagcgggaacagttcatgcagaattattaaggagaggaacccttgacacatcttgtgttgagggttttttgttttggggacaaaatacactttgaggtctagttttgagtgcgtgtccccatttaaaatattatgaaataagtcttaagaatattccattacccagtatctactttctaattcaccttcctcaatgattttcttccaaccgttattctcgtaaaaatttaaggctttatgatttttagatacgcattttaaccttaatggcttatccatctttttaatcgatgcgttcatcaagtgaccgcctactcctttaccgaaagcagcagggtgaacgaaaaggttgtgtataaaattatgagataagtctaatgatgcaaaaccaaggatgcgatgttggtcctctgctatgatgatgtgctcccccacagtgtccttatcaaaatcttctaaactcattttatctatatcggcccaataaaaactttcacgtcgggattccaagtatatttttcttaaagttggaaaatctaatttatttgctgttcggataatcaacgaatcacttcctttgtgttgaataagaggctactgtatatgctcaaaaccaggattgaccttaatagatattgcagacgtgggacatttatatagagagatctactcgcagtattatctactgaagtataacatataatctttcctatttaatctttcaatatgttgagtgaaatcacttgactgttctcatattgggatttaatcgagaaggggcttcgttggtaaagggtgaattgaccccaggtagaaccgtccgctgcattctatgggaatatgcgttcttatcaaccgtaaaaaatgtagcagtaagccgtcttctcttgcagaaaacacgataacgattggtttgtctctatcgtcttactggcgaacttaatcggcttttgcttaatgatagtgattgaaaaaggagcctaaaataaggcccctaagaaatatgtgtgccttaccaaggtagcatacagcctggattgtgtggaggacatgttggtggagtagtgttgcttgaagccggtgcagataaagagaaacttaaaagtaatgccagtacacttaaagaagcgattcgttttttcatcgatattacctcctttccttttattatgtcatatattagcatgaaaaggatttaaatggaagtggtgaactgaaggcaatgtgcagaagtgtgccatcatttctagttttactattgatggtaaaaacgctgcttgcagtttacaaaatcatagatcaatctttctctaaattgagaggaaaaaagctcactctcaggctattaataattagataagaacgaacattttacactaatggaattcgcatataacttcacaatcttgaggctgttcttgcgtatatagataagatgcatgcaggtctacaacggatattcatttgacaattgacagaaacagcagtctatgtaatagtataaagaaagttcgaattgttgaatcgtgttcaatataacgaacaatgaggttggcaatcagtaaagtccatcttcataaaattgtcatttgttaagtgaaaaatcataacgacaaccactccaatgagcgatcgatcgatgtttcaatgaaacgttcttccctctgcatggaacaagatgatcgagggaggctactaaatgtcatttagccgcgttttaagagaatgagtagctgaggagtatacctcaatttgagttcattagggaggtgttgcagtagtgttgtctgatttgaaatctgcttttcctgagctagcgatggaaccaggctctcctgacagttggttaggcaatggtggacatgtccatgtatatccaacatcagaaaaggaagttgtaggcttgctcaagtttgcctacgatcatggcaagtcagtgtccgtgcaaggcaacggatcgaagcgagggttcggcggcctgaaggaatcgtatgatgtgctcttgtctttgtcaaaatatactggtgtcatagagcactccccaggagatatggtcgtcactgtaaaagcgggcacagcttttcatgaacttcaggcctatttagcaaagcatcagcagcaagtatcgcttgatccggcgatgccgcacttatctacggtcggtggtgtaatcgcttccaacgacagcgggccaaaacgcatgggctacggttctgcaagagatatcgtgctcgggttaaaagtggtttatcctgatggaaccgttatccgtactggcgggaaagtcgtcaaaaatgttgccggctatgatatgaataagctatttattgggtcaatgggcacaattggggtgattacggaaattacgttaaagctgatgcctttgcctaaatgtgagagcctagttttcattccatttcaggacaatcggttggatgagctgcgctcttttgtagtcacgcagtttgattctacactggagcctacagctttcgaattcattagcccttcgttagcggagcagctaactgggcgcaaacaatgggcgttagcaatcggtttggaggatgtagaaagctctgtcatctaccaggagaatatcgtgaaacaggcagtacctaaggaagcagcagacgttcatatttttcgctctgaagaggctagagcgttttggaacgggctaatgaacataagccctaacggaatgggggagccgtctgagcaagcagcaatcaaagttggattaaaaatcggcgtgaagaacatcgacgtgcttcaaatgctcgccgaatgcgtagcgttacagcaacgtcacaacctcgttgtttatgggcacggcggttttggccatggcctatgtcacgtcgtcttacaaggtactagcgaagacgtggaggctgccattcaagcattacgtggtactgcaaagaagcttaatggctatgtgattgtcaagcatattccgttttttctgcggcaaagcatcaatgtgtggggagacaaaccagattactttttcctattcgagggcatcaaagccagtatcgatcctagacgcgtgctaaatgagacaaggtttattggggggatataattatgagtttgaaagaaagtgagttgaacgtcgatccgccttgttctcctaccagcaagagcaattatttatggaacgatgcgccagatgagaataaatgggctgattgcgtacactgcgggatgtgtctagaatcatgccctacctatgagataacaggtcaagaacaacactcgccgcgcgggcgtgtccatctaatcaagtccgtagccgaaggcaagcttgaagtgaatgaaccgtttatcgatccggtctaccaatgtttagattgccgggcatgcacgactgcttgtccagctgatgtggatgtaggcggcttgattgaagaagcaagaggacaaattcgccaagcgatgccgttaacaggtattaaggggctagtgagcaaatttttcttggaagggttgtttcctcatccgaagcggatgcaatctttaggcgggttgttaaaaatatatcagaaaagtggcgtgcagaagcttgttcgcacgacaagattgattcacattatgccaaagcaccttgttgaattggaagcgattatgcccggcatgggtgttcctgtccgtaagaaatacaaaaatgaaaacatcattctggctaagggcgaagaaacacataccgtcgccttcttaactggctgtatcatggacgtcatgttcagtgatattaacgagtctacgattcaagtactgacgcggaacggaaataatgtcaccattccgaagcagcaaacatgctgcggcgccttgcatgtgcatgcaggcgatcgggagactggcagaagattagccaagcaaaacatcgaagcgtttgaaaacgcacagacagtcatcgtcaatgctgctggctgcggctgcatgctgaaggattacccagaattgttccgcgacgaccccaagtggcacgaaaaagctaaagcattctctgcaaaagtacaagacataacaaagtatctttacgacacaggctatgaaaagccgaagtcagaaatgaaaatacgcttgacttaccatgatgcttgccacttggcgcatggccaaggaatccggcaagagccgcgcgaactattgcatgctattccaggggtcgagatcgttcatatgccaaacgctgatcgttgctgtggcagcgccggaatctacaacattaccaatcctgagatggctggcgctgttttggaaagtaaaatggagaatgtgccggaagacgtggagatgatctcaatgggcaacccaggttgtatgctgcaaatggcagttggcgtacaaaagtatgggcgaaggcaaaagattgtgcatacggtgcagttgttgaattgggcgtacaagcgagacgatgaacagttgaatgaataaaatcccattcaggaggtgaaggctgtggcccgtaagatcaaaacaaacgatcccgatattctcaatcttgcgaagcttgtagacggcccgaagtcaatcctttatttaaaggaagacttgatcgcttatgattgtgatggctttacaattcataagcatttgcccaaggcagtcgtcttcccgaaaaataccgaagaggtcgcaaagatcgtcaactattgtgcatcacacgatctccctttccttgccagaggtgctggcactggtctcagcggcggcgcgatcccgatcaatggggaagtcattattagcatggttcgtatgaagcgtttaatcagcgtggatttggaaaatcgtcgtgctgttgtcgagccgggctatgtcaacttgaaattgacgaacatgattgctgataaaggctattactatgcgcccgatccctctagtcagtcctgttgtacgatcggcggcaatgtagccgagaacgctggcggcgcccattgtctgaagtatggcgtcaccactaaccatattctcgggcttgaggttgttcttcctaatggcgacataatcgatatcaactgtgaaggtatagcagacgtgcccgggtatgacttgctcggcttattaacaggctctgaaggaacattaggaatcgtcaccaaaatcacggttcgtattttgaaaaatcctgaagccaagcagacggtacttgcttacttcgacgaagtgtcagacggcagctatgccgtatcagatattgtatcggccggaattgtccccgctgcgcttgaaatgatggataagaccgcaattgaaggggtagaagctgctgcgtttccggttggccatccccgagacattgctgcccttctacttattgaagtggatggcatttcggcagggatcgatgaacaaattaatcagattctcgacatttgcaagcggcgacatgtccgcgaggtgaaagttgccgaaaatgagcaagaacgggcaagatggtgggcgaatcgcaagactggtttcggagcgatgggagccatttcagcggattatttagttcaggacggtgtgattccgcggagcaagttacctgaggttttggagcgaatcaatcaaattagcgagcaattcggacttcggatcgccaacattttccacgctggggacggcaatcttcatccccttgtgctgtttgatgccagaattccaggcgagacagaaaaagcgttggaagccggcagcgcttgcttgaaagcttgtgccgatgtcggaggatcgattactggggagcatggcgtaggaatcgaaaaaatggaagaaatgcgctttgttttcaacgaggaggaattggctgcccagacacgaatccgtgaagtgttcaaccctgataatctgctaaatggcgggaagttgttcccgagcccagggcgttgtgtagaggtcaaaaaaaatatgaaggaagttgcttcggcgaagcaagcctaataaaggagatgttcgaatgacaaattacgtaaaagctggagatttgcaggttgcacaggaactttatgaatttatcaatacaaaggtgattccagacagcggcgtgacgaagaacgatttctggtctggctttgccaatctcgtcaaagaccttgttccgattaacaaagctttattggcgaagcgcgaccgtattcaagaccagatacatgcctggcatagagcgaatcaatcgtatcgctttcaagattacaaagcatttttggaagagattggctacttggagcctatggtggatgattttcaaatcacaactgaagacgtcgatgacgagattgccctccaagctggaccgcagcttgtcgttcctgtaaacaacgcacgctttgccattaatgcggcgaatgcccgctgggggagtctatatgatgctttgtatggaaccgatgcgattagcgaagaagctggtgccgataaaggaaatgcgtacaacccagctagaggagcaaaagtcattgcatatgcaaagcaatttctagacgatactattcctttaaagcaaggttcccataaggatgtcgtacactatagcatcgatgacggtgctttagcggcaaagcgaaaagacggaacaacaacagggttgaaggacggtacacagtttaccgggtatcaaggcgagacggcagcaccatccgctctgttgttcgtacaccatggccttcatttagagattcagattgatgctacacatcctattgggcaaaccgacccagcaaatgtaaaagatattgtgctagaatcggccattacgacaattatggattgcgaggactcggtgacggcagttgatgccgaagacaaggtgcttgtatatgccaattggctaggcttaatgaaaggcgacttaacgtcaactttcgttaaaggggaccggacgatcaagcgaacattgaattctgaccgagcgtatatttccccagacggcagctccctcactttatcaggtcgttcgttactgttcgtccgcaatgtcggccacttgatgaccacgaatgccgtccttgataaagacggccaagaggtgccagaaggtttcctagattgtctcgttacgagtttaatcggcaagcactccctattgggcaatggagcttatcgaaactcacaaaagggatcgatttatattgtgaaaccaaaaatgcacggttcagaagaagtcgcattagccaatgaactgtttaaccgtgttgaagatatcattggacttacccgccataccattaagatcggtgtaatggatgaagaacgccgcacgtcacttaacttaaaaaattgcatccatgcggtaaaggaacgagtggtcttcatcaatacaggcttccttgaccgtactggcgacgaaattcacacctctatggaagctggcccaatgattcgcaagcaagagatgaaatcctccgcttggctcaatggctacgagcaagcaaatgtagcggttggcctcgctgccggattgaagggcaaagcgcaaattggcaaggggatgtgggccatgcctgatcaaatggcagatatgctcaaacaaaaaggtgctcagctgcaggctggtggcaacacagcctgggtgccttcacctaccgcagcggttttacacgccatccattatcaccaaatcaatgtgaacgcggttcagcaggagattgcatctgagcaaagcgactatcgagatgaaatgttgcagattccagtcgctgaagcgccgaattggagtccacaagaaattcaggaagagctcgataataatgcgcaaggcattcttggatacgtcgtccgttgggtagaaatggggatcggctgctcgaaggtgcctgatatcaacaacgttgcgctaatggaggaccgtgcgacactgcgcatctctagtcagcatatgatgaattggcttcatcacggaatctgcacgaaggagcaagtgcttgaaacgttgaaacgcatggccaaagtggtggatcagcaaaacacaggcgaccccgaatacgttcctatggcgcttgattatgaaaactctgttgctttccaagcagcatgcgacttggtgttcgaaggctaccatcaaccaagcggttatacagaaccgattcttcatcggcgccggaaagaagcgaaagcgaaagccagtgtaatgacgagaaaataagcgattcaagaggagttacggtgatgaaatttgtccgatttactgtaaatgcaaagacaagccaaggcgttcttgaacacgaaacaattaaagccattcaaggcgatttgttcgctgagtggcgttttacaggcgaaacgtatccagcacaagatgtaaaatggcttgctccacttgtaccgaaccaaataattggaattggtgctaactatgtcgccaaagttgaagagcggcctgagacgttgcccgatattcctgtatttttctttaagccaacttcttctgtcgttgggcctaatgatccgatcgtgatcccaggcgctaacgaacaggtgaagtttgaatctgaattagccgtcatcatcgggaaggaagcgaaaaatatcgacgagtccgacgtgttggactacgtttttggctatacgattggcaatgacgtaacagccccgcagtattttcacgaagctggccattggatgatcggcaaatcattcgatacatttacaccattggggccgcttatcgaaacggaattgaatcccgataccgttcgagtagaagcgcgcctgaatggggaagagaagcaaaacagtgctacggaattaatgattgtgcccgttcgtgaaatgattgcttatttgtcccgcgtgatgacgttaaagcctggagacgtcattctgacaggcagcccactaggagcagaactggttggagcagggaatgtgatagagtgtgaaattcaaggaattggaaagttgaagaatagattcgtagaccagctatcctaaataagctgtctatcacatgtgtgctttttggaaaagacttaaaatgagacaaggtaggggagctctaagtgggagtaatcgcaggaggacatgcttgaaattgagcaaactggataccgccttgtttcatcatgattgcctgacagctgcaggttgatggataaacccatcaatacatgtaggggcttggtcacgtgtaggcgctgctgggatcgctaacacaacattgttgccccgttgatttgagcagctattgaggccgatttttcgttcggaaaatcccttatgcaacaactagaaaaccatgtagccttgctccgaaacttgaacatgtcggaacaaggctgtttttcatctctcaggagtggaggggatgatgcgatgattaaaggtgagaaaggcgctgggcaagttggacaatttcttccaaggcacgctctttcttcccttcccaatggtgaatcggcatggaacaactgatcgcagcggcgatttctccgtttgctttacgaatcggtgcggctgtacagcaaaagcccatgacgccttcctgaatatctattgcatatccagctttccgtacattcttaagctcgtggatcaaagcttccctggagccgatcgtatgaacggtaattttaggaagtgattcttccggatataagttgcatatttgttgttcattcatgtcggccatcaaagcttttcctagacccgttgcatgcgcagggaagcgaactcctggacctgaaaccatctggacaggactgggggcttctactttagctaaatattggacgtcgctgccttcaagcactgctaattggatcgattcttgaagattgcgcatcactggctcggccaagcgccgaaaatcttcactcagatcgaactgctggaaaaaagcgctcccaaaacgtcctatagcgcttccaatcgcatatgtttcattgcgatcacggcttacccattgcaagcgctccattgtcgctaacagcgaatggagcgtgcttttgctaatcccgatcattttcgacaaatcggataacttccatctgtatggttcgtctcttaaaaccgttaatacagcgttggctcgatctaaggcaggcacatgatatttttgctccatctataaattcacgccctaaaacagtatattgttcgttattatgaacagttaaaatcgtaccattttcgatgatgggccgtcaaacgaatagcaaggctttatcatcaatcgccgatctttgaaagatgattactataatgaacaaaaataaggggaggatgagacatcgctggaatgtagagttgtgtcatgattgcacggtctacgttaacggtcaaaccatcgcctcaactcagatcccttaaaataagtggcttcctgttgaatcccccctttgcctaacagaatgggggagcatttattgtttataacagatataacttatagcgtttccgccgcttttgctacctcggtttgtcaattcgtttctatgaaaccatatggaatcacttagtttacataatattaattacgtcaattatcaaacccatacgaatacgaaattcgcaaaaaaagtgccgtagtcggcacgcattcattaaagaaactcttccatgacgtcttcgatgaattcggtctcctcccgataaatttttagcataaaatacatcaaacacgttaaagaaaagagcagtggatggcgcgatgcttctgcgtcgatgagaagatcagcccctaaaaacgatttaggtttgataagggcaaccttttttccgtctacgctcacttctatttcttgatcctgattttcctctatattccatatttttctgttaatggttccactgacgcaaaaatacagaacactgttaagcttgttgtcttttagctgaaattcttcgccgttgagttgaaaccggtaagctgcaaataacaaacggcctttttttattcctagcgtcgctcttacgccttcttgttcaaagacaaacgtagtgcctttctcattgccaggaacagtcgttttctttatttcccctactatacggtcttgttcgtctagcacggtgacgctctttttatcatgaaggataagcacatcttttattttaaagcttagcacgctcgaacaccctttctgtctagctctagaaacgatcttataatcgaaatacgaggacacggaataaaagtttcacattccgctagctgacatgggtgtggtgaaaacgccattcctggcttttgaacatgtggggaagaccgttattagcagccaattccaaacgccttttttccatatgctaaaagcccttcgtaaggatcgccgctaatgccaagcaaagaagcaaacgccggctctgttttcacgccttgttttttcatctctatcgctttttctttccattcaggatgggccattaaaagcatgtgttcaattttcatatgcaaataagcatattgacattccacacattgcggctggccaaatagctcgaacgcctttccttgatagcgaaagtttgcctttactgtcggcacgccgcgaatcgttttccgttttagccgaaattgggggagttcgccatacagcgccgttacggttcgttcaaatcgctcaaattgacggacttcacaaattacgtctaagtcggaagagggaatgtcaatccctaacggaatcgtaccgcataataccggggaataatgtttgagtgccgccattaagtcgagttctgttaaaagccgataggcaagttgttgagaatgcgtgccagtttgtaagtcagcgaacgttttcataagtaagtgcgctcctttataatcgcaaaagaaggttctatttacaggatagcataaacgaaaaagagggtggactcgatttaatcgcgtgctggatggttgtagcaatccaataaattaaaaatagacaatggagcaaccaaagagacaagctaaaagatggttgctaaacaaaatttcacgtaccatactaaatcatggcaattgacaaccgatcaaacgttcgctaaaatgaaaatggatactaattggaaagggaagagggaagatgccgttttctgcagggattgaattgccagaacctcatcgggatacaactaggaaaatcattcacattgatatggatgcttttttttcttctgtagaggaacgggactgcccttctttacgcgggaagccggttatcatcgcaaaacatccccggaaaacgggtgggaaggggattgttgctacagcaaattatgtagcgcggcaatacggcatccactcggcaatgagcgcatatgaagcttataaacgttgtcctgaggggatctttatagaagggaattttagcgcttatcgagaggcttcacttcaaattagggacattatgcatcgctatacagatttagtcgagccaatgtccattgatgaagcttacttggatgtcacagaaaacaaattaaacataaaaagcgcgacccttcttgctaaaaacattcagcaagatatttggcgggaaacaaggctgacaagttcagcaggcgtctcctacaataaattcatcgcgaaaattgcctctgattaccggaagccagcaggcttgacggtcatcacgcctgaacaagcacttgccttcatccatcaattgccgattgaaaaatttcctggtattggcccaaaaacaagcaaaaaaatgcacgagttaaaaatctacacaggtgcagacctctatcaaatggaacaacttgacttgatccatcattttggcaaagcaggaatttcctattatagaaaagcccgtgggattgacaataagccactgaacttacagcgtgaacggaaatcggtcgggaaagaacatacgtatttccagcctttgacgtctgaagccgctgtcttgaaggaattgcgccgtttagcaaaagaagtggaggcggttttggaacgacacggcaaacaatgtaaaaccatcgttgttaaaattaggtaccgttcctttgagacgctaacaaggcaaaccagtttcacggcaccgatccgagacagcgccgacatttatagctacgcagcagaactctgggacaagttcggccaggtagaccgagaaattcgcttgctcggcgtaaccgccactaaactggagcctgttgaacatcaactgatttcattgtttccttatcatttataggctcctagagaaaaaacaaaataatccccactataatcaacaaaataaacaacacgaggatggttaccaataaagcccagccgttgtcgttatccatataaaccctccttgccttcctttgttagcctattcaactgcatgaaatatggtgataacggaataataagcgccctttttccgttgcctgcgattgtagcgccctcaaatcgcgattttcacggtttgacggttcttcttttccgctatatatttagattgacgaaataaaatcgatagtagtatgtaaacgaaggtgattggaatacaacctgaaaaacgaaatttgctcatcatgtggtttgccaacttttttgtttcggcaagtatgacgatggtcattccttttttatcgctatacattgaatcttttggtcactacaacgttgatgaagtccagcgctgggcaggatatgtgtttgctgtctctttttttgtcgcctttcttgttgccccgctttggggtaaaatcggcgacaggtttggacgaaaaaaagtgttgctcggtacaggattaggcattgccttatccgtcttttttatgggatacgtccattcagcagaacagttgtttgtatggcgtgcttttatgggccttgccacggggttcattcccgcctcaatggcgttgatagctgcccaaagcagcaaaaaaacagcaggtgaaatgctaggaacattgcaaacagggacagtttccggcggtttgcttggacctctttttggaggattgatcgctgatacagtgggaatggaacttacatttttgttgacgtcatcgattctcctaatcgcaacagtcctcgttttaattggcgtaaaggaagttgtttacgaagaaaaaggggagaggaaaagaaagtatcgttcaaaagaagtgcttgggcgtatcgtaaaaagcccgctgctcttaatggtgatgtttgttgctttaattgtgcaaatggcactgtttagtgttcaaccattgctcgccttatacgtcaaccagattacccataatactgaaaacatggctttcttagcaggtgctgctttctcggtcactgggcttggcaatttaatactaactcgtacttgggggcaattcggtgatcggattggccatgaaaaagtgatgatgattttgctgctattatcaggcctgttgtttatcccacaagcatttgtcggctctctttggcaactgattgtcttacgttttctgtttggcatggccgtaggcggcttactaccgtgcacaaccgcttttatccgccaggcttgccctgttgccatgcaaggggaagtgcttggctataaccaaagttttcgctttcttggaaatgtgttagggcctgttctcggcggaatgatagcaagtggctatggcatcccatatgtatttatttcggctggtttgctgttcctgatgacagcagtcgtgcttaaatggactcttagccatcagcaaaaggaacatagcagccaaccagactaaaaaagctttctgcgagtgttctactcgcaagaaagcaaatggaattaggttaatacgttgggcgagaggtgttctatagctaatttagttgttaaatttttggctctaccagtgcttgattgttcttgtccttttcggtgcatgagaacagcgattgttcggttatcagagcatagctattatgctagtatcatcgctatcgttatagtagtactaagcttgatttcctttggcatcctactggcttttaaaaaagattggtgaaggaataggcaattaaatacggcataagtagaaccaccttcttctcatttattatatgtacgagcgaaaaaactgcttggtcatttgcaagatggcagctacacaaaaaagactcttttatccccattcgatgaaagagtctttagtgtttgtagaaaattagctttgatcgattggacgagtcgtgtcaagcacgaacctcttttgttttgcttccatctgacaagcgtatttcagatttaaggggcttggtcaacagcctgaaaaagcctattggtccgttagtggatcgtgcggaacactccgatgacttttccgagaatcgtgcagttttcaaggataattggttccattgaagaattctctggttggagacgaatgtagtccttttcccggaaaaaccgttttactgttgcttcattatcttctgtcatggctacaataatatcgccattatcggctgtttgctgttgccgtacgatcacttggtctccatcgtaaatacctgcttcaatcatgctttccccttgaatgacaagcgcatacgtattgtcgtaagcggcaaggtggtcggggagtggcaagtaatcttcgacgttttcaacagcagtaattggcacacctgcggtaacttttccgattaccggaataaagcttgctgtctcttttttgacaaatgtatcattatcaaatccgagagaaaggacttcaatcgcccgcggtttagtaggatcgcggcgaatgtagccttttttttctaatctggccaagtggccgtgtacggtggaacttgaagcaagtccaactgcttcaccaatttcccggacggacggcgggtacccttttttctttacttcatcttttatgtacgccaaaatttcttcctggcgcttcgataatttcgacattttcccacctgctttcatatgactgttctaaacaaactttaccatatcgaacgtatgaacgcaaacataagttctaaaaaaagtagttgacacgaacagttgttccttgtattctgataacagaacaaacattctctaagaacgggtgatcgtattgaggaaacaagatatggggctagtaggcggcggcattttaacagtattgttcattttctcaagtttggtatggcctggcgagcaggaaaaagacgataacaagaaacacgaacagcaaatcgtgcaagagcaaatcgttgaaacaacttcgattgatcgcgtttttttaattgacaattaagactgccagcaatgtaagtaagcgaagcaaaggtgccagaaagacatacttcatcttttttagatcggaagcatctttgtttataaaatgaagaggttgagcacagtagccatgccactcatgttgacgacatcgatttggttttagattagtggataggggctagcggattttcacgggaaggaggccgcggagaattggcagaaaagggacaaaaacaacaggcggctatctattgccgggtgagcacgacgaaagaaaaccaagccagttctttagagaggcaagaaaaagaactggtcgaattggcaaggacaaatggcatggatgtacacactgtttttaaagagcaggcgagcggctatagcctggaacgggattgcctccttgctttattggatttatgcaaagaagggattgtctcttgtttgcttattacggatgatactcgcctaggcagaggaaaaacgaaaattgcgctcttgtaccaattgaaaaaatatggcgttcctatttatacggcccatcatcaaggggagcttgtattgtctgaagcggatgaaatggtgctggaaattgtcggtatagtagaagaataccaacgaaaactacataatttaaaaataaaacggggaatgaggacagcagtagcgagtggataccgtccagagcagaacttgtctaagaaacgaggcggtggccgctacgaactcgatttaccagtggaagagattgtcaggctccgtgaccgggggctgactttttatgaaattgccttaactttaaaagggatgggcgttgattgttcaaaagcgactgttcatcgccgttatcaaaaatacattaaagaaaacgcataagctggtggttgacagcaaaaaatgatacaaaccaatcgctcagccgtacaggcgaagaaagaaacgagtccataaggaatgcgtgagcgacggtttcttggaacgacatttccaacgcctaggagcagggcagagcgtatgcgatgtttgtctagcctcccataagcgaatcgtttgcccttgtgttgcatgagtgctatgatgaggggcgaaacaaaaggtaggtgatgacgatgttgtcaaaagaaaaacttgatcgcatcaatgaattgtcaaagctagcaaaaacagttggtttgacaaaaaaacaagcaatggaacaaaaagcgcttcgcaacgaatatttgtcggctttccgctcgtcgtttacggaccatctccatactgtaaaagtcgtcgacgcgaaagggaatgacgtaactccacaaaaattaaaggacagcaaggcgcaaaaacataaacgattgcattaactgtacaagtctactcaggcttgtacatttttttcagaaagtatatgatgagagggaaagaaggcagcagaaagggtgttatccattgacaaataaagttgaagaattggctgttaacacaatccgtacgctatccatcgacagcattgaaaaagcgaattccggccatccagggatgccgatgggcgcagcgccaatggcattaaatctgtggacgaagcatatgaaccataaccctgcgaacccgaagtggtcaaaccgcgaccgtttcgtgctctctgctggccatggttccatgctgctatatagtttgctccatttaagtggatacgacgtgacgcttgacgacttgaagtctttccgccagcttggcagccgtacgcccggccatcctgaatacggccatacagacggagtcgaagcaacgacagggccgcttgggcaagggattgccatggcagtcggcatggcaatggcagagcgccatttagccgctacatacaatactgataaatacccgattgttgaccattttacgtatgcaatttgcggcgatggcgacctaatggaaggcgtttcccaagaagccgcttcattagctggtcatttgaagcttgaacgtttaattgtcctttatgattcaaatgacatttcacttgatggcgatttgcatgaatcgttctctgagagtgtcgaagaccgtttcaaagcttatggctggcatgttgttcgtgtagaagatggcacggatatggaggaaattcaccgcgcgattgaagaagcaaaacgggtagaccgtccgacgctcattgaagtcaaaacagtcattggctatggttcaccaaacaaagcggcttcatctgcttcacacggatctccacttggcactgaagaagtaaagttaacaaaagaagcatacaagtggacgtttgaggaagacttctacattccagaggaagtgaaggcttattttgctgcagtcaaagaagaaggggcagcgaaagaagcagaatggaacgacttgtttgcggcatacaaggcagaaaatcctgaattggctgcgcagtacgagcgcgctttctcaggggagttgccagaaggatttgaccaagctttgcctgtttatgaacacggcacgagccttgcgacgcgggcttcttcaggcgaggcgctcaatgctcttgccgcccatacgcctgaattgtttggcggctctgctgaccttgctggctcaaacaaaacaacgctaaaaggggaaagcaactttagtcgtgataactatgctggccgcaatatttggtttggtgtccgcgaatttgcaatgggagcggctttaaacggaatggcgctccacggcggattgaaagtatttgggggaaccttttttgtcttctccgattacctgcgtccggctattcgcttatctgcgcttatgggcgtgccagtcacgtatgtgctcactcatgatagcgttgctgttggcgaagacggcccaacgcacgaaccggtagagcatcttgcggcattgcgggcaatgcctggcttgtccgttgtccgtccaggtgacggaaacgaaacagctgctgcttggaaagtcgcactagagtcgtcagaccgcccaaccgtgctcgttcttagccgtcagaacgtcgatacgttaaaaggcactgataaaaaggcttatgaaggggtcaaaaaaggggcatacattgtatcggagccacaagataaaccagaagttgtgctgttggcaactggttcagaagtgcctttagctgtaaaagcacaagctgcacttgctgatgagggcatcgatgcttcagtagttagcatgccgtcttgggaccgttttgaggaacagccacaggaatacaaagatgcagtcattccgagagacgtaaaagcgcgtttggcgattgaaatgggctcttcatttggatgggcaaaatacgtaggcgacgaaggagacgtgcttggcattgacacgttcggcgcttctggagcaggtgaagcggttattgctgagttcggctttacggttgacaatgtcgtttcacgggcaaaagcgttattaaagaaataaggcatgcgtttgtcctaattgagagtaacgaaaaaggctctacttgagcctttttctttttcgacaaaactagcgatcaatttcagcgggaaaagacagttatttcagaacaaaaagtgtatactagcagtagcttatccgggaggcgatagacaatgaggcactatgagctttatttgcttagcgatgaagtggccgcttccttttcaggaaaagaggccaagctgtttcaattgtttacagaacgggcaaaggcgaagcaaagcgaacggcatatctatgatcggcaagtggattacattacgaaaccgcttccgaaagccaaactccacgaagcgctgcagaaacggtatgggcttaaaaaaggaaatggttatgagctgcgttcggcatttaatgagcgaaacagatgcctcgtagagcttggcgataaaagtatccagttggaagcacttggtgatttaagtgcagagacgactgtatttgatgtgttgaaggaagtcgacagtcacttttttgcagtgaatgtcgcagatgggcggtttggctggctccaaccttttgaaaaacaacgcgtgctttaagcgcgcttttttcatggaaacaaggtttgcagcgtcctgctttgccgtgtgtcttgaataataatgactgaatccatcgcaagtccttttaaattagaaggggctcatgtataatagattaggttgtatacgagttaacaagaaagggttaaggaggaagaagcaggaatggtttggcatattatcggctatacagtcgctgttcttgcgggattagccattggctttttcattgcccgcaaaacaatgatgtcctatttgaaaaaaaatccgccaatcaatgaacagatgttgcgtgttatgatgcagcaaatgggtcaaaatccatcgcagaaaaaaatcacgcaaatgatgaaagcgatgcaaaagcaacagtctaaataagtgaacaccctgtctgagcggcagggtgttcactgtcatttggtttttaaataatatgaatttttactgaaacgatcgaagtgggaggcaggggtatgcgtgtttttgtcgacttaaactggttttttaaaaagcattggcgtgcttatgcaagcggaattgcagtgcttgccgtcgtctcttttttatcgctcattccccctcgtgtgattggggaagttgtcgatgggattgccgacgctagcttaacaccgtctgcattggtaaacgctgtcggcttgattttagggattgctgttgttttatacatattgcgttttttgtggcgtttactcatttttgggacgtcgttaaagttagctcggcaaattcgttttgatttgtatcggcattttacgaacatgcctgcttctttttaccataagcggacaacgggggacttgatggccgtctccacaaacgacgtgcgcgcggtccaagcgactgctggggaaggtgtgttaacgatagtagacgcctgcttgcttggtgggatggtcgttgtaacaatggctgtttcgatcagttggcagttaacgtttattacattgttgccattgccgtttatggcgctattaacgagctattatggaaaactgcttcatcgtcgttttgctggggcacaggcagcctttagtgttttaaacaacactgtccaagaaagtataggcggaatgaaagtaacgaaagcatttggccgtgaacaagaagaggtttcccgttttgcgaaaacatcagcccgtgtggtcgaaaagaatatggctgtcgcgagggtcgatgcgttgtttgatccaacaattacgattgtgatcggcagttgttatttgctagcagtcgctgttggaagtttgtttgtcgctgatggggcgatgacgattggccagttgacgtcttttttcgtttatttaggtcttttgatctggccgatgttggcgattggcatgttcttcaatgtagtggaaaggggacatgcatcgtatgaccgcatccgcgctgtgttgaatgaaaagtcagacattgttgaaagggagcaggcacttgatttggacatccaaggtgagctcgacgtccgtattgacgcttttcgctattcgccagacggggcaaatgtgcttgagaatgtccattttcacttgccgacaggtgggacactgggcattgtcggaaggacaggcagcggaaaaacaacattgttgtcactgttgcagcgcacgatcgatgttacggagggggatatcctccttgatggccattcggtccgggcttatcaacttagctgcattaaagacgcatttggccttgtgccccaagaacattttcttttctcagcgaccattgctgaaaacgttgccttcgcgaagccagaagcgtcaatggcagaaattgtcgctgtgtgtaagctagcgcaagtgcatgaagacattctccgtttccctgctggttatgacaccatcgttggagagcggggcgtgactctttctggtgggcaaaagcagcgtatttccattgcacggacgttgttaagcgacccaactttgctcgtacttgacgacgccttgtcagcggtcgatgcgaaaacagaggaagcgattttacaagcacttcaaacagaaaaacgggaacggaccattatcatgacggcacatcgcttaagtgcgattagccacgcctctcttattctcgtgcttgcagacggaaaggttagccaatcaggcactcatgctgaactaatgcaacaaggtggctggtataaagaaatgtatgagcgccagcagcttgaatcggccgtggagcaggggggaaatgaatgaaacatacagatggcgttatgacaggacgtgagcagcgagccgttttttggcggcttctccgttacgctggcccgcataagaagcggttcatgttggctcttgctattatgatggtcgctgccggagcagaactgctgcaaccaattttgattgcccgctttattgacgattatttaacgccgcaattatttgaactgaaaccactgttaacgcttgcagtcttgtatgtagggctattaatcgcggctgtgattggacaatatgtacaaagcgtccttttttggcgaattgcgctaagtattgtccaagcattacggctcgatgtattcgctcatgttcaaaagctagggctgtctttttttgaccgcatgcctggtggcgctcttatttcacggattacaaacgacaccgaagccatcaaggaactatacgttagcgtgctcgcggtttttgttcaaaacggcgtatttatgatcgggacgtttttggcgatgttttacttaaatgcgacacttgccttctattgtttggcttttctgccactccttcttgctgtagttggcttgtaccgtaaaatcagctctcgcttctatgaacaagtgagcgccaaattgagtgagatcaatgcgaagttgagcgagtcgatccaagggatggccattattcaagcgttccggcaagagaagcgtctgcaaaaagaatttgcggatacaaatgaagcccattaccgcgcagggttccgggcaatgaaagcagacggattgctccttaggccgatcgtcgatgtgttaagccaccttgccattgccatcattcttttgtactttggcttcggctcctttgctggtccagtagaaattggcgtgttatatgcgtttgtcaattacctagaccgtttttttgagccggtcaaccaaatcatgcagcggttatctttattccaacaagcgatcgtttctgccgggcgggtcttccgtttaatggaccaacaggagtttgccccaggtaaacagggggacgataagccgcaaatggcagacggtgaaattgaatttgataatgtgactttttcttatgacgggaaaaccgacgtgctaaaaaacatttcattcactgtcaaaaaaggcgagacacttgccattgttggccacactggtagcgggaaaagctctatcattcatttgttgttgcgtttttacccgctgaagcaaggctctattcgtatagacagaaacgagctatccgcctatccagaagaagagctaaggcaaaaagttgggcttgtgttacaagacccgtttatgtatagcggtacgattgccagcaatattacgctcttccgtgatgggtatacgcaagctgatgtagaggctgctgccgcttttgtcggcgctgatgcattcattaataagttgcctgatggctatcaaacggaagtgactgaaaggggagggacgttttcaagtggcgaacggcaactgctttcctttgcaagaacgatgatagccgacccgcctattttaatcctcgacgaagcgacggctatggtggataccgagacagaagaagcgattcaaaaagcacttgtggcaatggagcaaaaccggacaacgattgccattgcccatcgcctgtcgacgattaagcacgctgaccaaattttggtgctccaccaaggagaaattgcggaacaaggttcccacgaggagttgctgagtaaaaaaggtctttattataaaatgtatttgctacaggcaagagaaaaaacagccgctatttaaaccgattaaagcctgtccggccattggccaacaggcttactgtcattgtgcgttcattttacggctttctgcattccggtcaagcaaatgttcgtatggcgccaaatcaatttctttttcggttagttttttaatcaaaaatttatggtcgcgttttggtgtagcgataatgtagccacggatcataatgtctagcgtcaatgtagttgctttttctttaatggcaatctcgctaattttccccgcaatcttttcctttgcgacatcgcggaacagttcagggacaggctcaacgagttcattaagcaacgtacgctggtcttctccccataggggcaatgcttgattaatgtaatgttcttgccaatcaagaatcgatttgccgtctgcttttggcaagcgctttaaaaatttgcggaacataaaatagccaccgatgagcataagtccaagcaagatgaacgtccatagaataataaaactcataaaccaatcccaacctgacatgttcatcctcccattttgcttgttcttcgcattcactgtatcataaaatgggtataggcgctagcaacatggcgtttttttcaatggaggaaaaagggatgaatgctgcgttgatcaaggggggctggatagtgacagaagaaaaagcagcgcaattgctgcaagcattacggacaaatgaagtaaccgaagtgacggtgtcaaaagaagagttcccagtgtttcgcaacgtattgacgaaacaagaggatatgaaaagttttcgaggagcagccaaacattttggtgcggttgtttatacgtacgagcctggatggactgcgtaaagaaaaatgcaataaaaggctgccatggcagccttttacgagcctagaaccagcttgcgccgacaattactagcaagataaacaagacaacgataagtgcaaagcctccaccatatccgctcatagttgaacctccttttaacaaggtatgttctagtctatgcaagcgaaaaaaaagcgtatgggcggactttcatgctcattcgccgtttgtttgattgacttggttggcttttttggttttgtgcgagccactcaatggctccggctggccacttccttgcttgccttttggctggttgcggcgttggcttttaaatgtatgtcgttccgtcatgaagcattcctccttgctccttagtataaggcggcaaccattttttctattcaaatttaatatttttgtcgaaaaaagatttaaacttggcgcaacttttgctatcctaatgaagggaaatcttcctgaatgcctgtttgtaaaagcgcttacggacgggcaaatctttagacaacgctctcataatacgttatgataatgctgataagggggtctttcgatgtcaaaaaaacaagacgtgtttaatgctaagtcttcttttgacctgaatgggaaaacgtaccattactatgcgcttgatgcgctggaaaaagccgggatcggaaaagtcagcaagttgccttattccgttaaagtcctgcttgagtccgtattaaggcagtacgatgattatgtcattaaaaaagagcatgttgaaaacctagcaaagtggggcacaaaggacgtaaaggagatcgacgttccatttaagccttcacgtgttattctccaagattttactggcgttccggcggtcgtcgatttagctgcgctccgtaaagcaatggctgacctcggaggaaatcccgaccaaatcaatccggaaattccagtcgaccttgtcattgaccactctgtccaagtcgacaaattcggaacagacgattcattgctctataatatgaatttggaatttgaacgcaatgcagagcgctaccaatttttaaattgggcgaaaaaagcattcgacaattacaatgccgtgccgccggcaacaggtattgtccaccaagtgaatttagagtacattgccaacgtcgtccacgctgttgaacaagacggcgaaaccgttgcgtttccagatacgttagtgggaactgattcccatacgaccatgattaacggtttaggtgttctcggttggggtgttggcggcattgaagcggaagctgggatgcttggacagccttcttacttcccggttcctgaagtgattggcttgaaatttacaggctcactgccaagtgggacaacggcaactgatgtcgccttaaaagtgacgcaagtattgcggaaaaagagtgttgtcggtaaatttgtcgaatactttggccctggccttgctgatatgcctcttgctgaccgggcgacgatttcgaatatggcccctgagtacggtgcgacttgtggcttcttcccaatcgacgaagaggcgttgaattatttgcgcctgacaggacgctctgaagagcaaattgatttggttcgcacgtactgcaaagcgaacggcatgttttatgtccctggtgaaacgcctgatccggtttacacagatgtggtggaagtggatctgtctaagatccatgccaacttgtctggccctaagcgtccacaagatttgatcgagctaccagacatgcaaaagtctttccaagatgctgtcgttgcgccagcaggaaaccaaggactcggtctttcaaaagatgaatttaataaaaccgttgaagtcaactttgcagatggccgcaaaacgacaatgaaaacgggtgctgtagcgattgctgctattacgagctgtacaaatacatccaacccatatgtgcttgtagccgcaggacttgttgccaaaaaagcgagcgagctaggtttgaaagtgcctgagtacgtaaagacatcactagcgcctggttctaaagtggtaacaggctatttgaatgattctggcttgatgccttatctagaaaacctcggcttccatttagttggatacggctgtacaacatgtatcggtaactctggcccgcttgaagaggaagtggaacaagcgattgcggacaatgacttgaccgtaacgtctgtcctgtctggaaaccgtaactttgaagggcgcatccatccgcttgtaaaagcgaactatttggcgtcgccgccgcttgttgttgcttatgcattggcaggcacagttgatgttgaccttttaaatgacccaattgccaaagacaaagacggcaatgatgtctattttaaagatatttggccaacgtctgatgaagtccggacaattgttgataaaactgttacacctgagctattccgtcgtgaatatgcagatgtgttcacgagcaatgaacgttggaatcaaatcgacacgacggacgatgctctttaccagtgggatgacgattcaacttatattgccaatccgccgttctttgaagggcttgccaaagatccagaagaagtgaaaccacttgatggcttgcgtgtaattggtaaatttggtgactctgtcacaacggaccacatttctccagctggagcgattggcaaaaatacaccagcaggtcagtatctgatggaaaaaggcgttaaaccaaaagactttaactcctatggctctcgccgaggcaatcatgaagtcatgatgcgcggcacgttcgccaatatccgcattcgtaaccaaattgctccaggcacagaaggcggctacacgacttattggccgactggagaagtgatgtctatttatgatgccgctatgaaatacaaggaagacaatacaggccttgtaattctagctggtcaagattacggcatgggttcttctcgtgactgggcagccaaaggtacgaacttgctcggtattaaaacggttatcgccgaaagctatgagcgtattcaccgttccaacttggtgctcatgggcgtcttgcctcttcaatttaaagcaggcgaaagtgcagaatcccttggcttgacaggaaaagaaaccatttctgtcgctattactaacgaaataaaaccacgggattatgtgacggtgacggctgttagcgaagatggcaagaaaacagaattcgaggcgcttgtccgtttcgatagcgatgtagaaatcgattactatcgccatggtggtattttgcaaatggtgttacgtgaaaaattggctaccgtgtaatgaaataaaagaactgcctgtaaatcaggcagtttcagatcgtagacaaaacgcctttgagaaaataattctcaaaggcgtttttttgatgataaagagatgggtggatattggagactttggagttggaggaagattcctcctccaactccaggtggctaattttttcaagttcatcgcaccaaaaacaaacatcgcctgcattgcatttttttccaaccctttcaggttggtccaacgcagaccatgcttctgtttcagatcggcaaagacacgctcaatcgtttctttccacttggcgtagatgtctcggttccgttcagtatgcctcagatgttctgcttcatccaaggcatcctgccaaatatggcgaaggacgagcttttggtgattccgattctttgtgcactgggtgagcagtgggcacgactcacaaatccgagggtcggagatatattcacgatatccctctcgattcgttgttcggtaagaaagcacctggttttggggacaaagaaaacaatcgtagtattcatcatagacaaactcgtttttccggatatagcctttaggggtcatcgggcgtttatatggcatgacgggatgaacgccttcttcttgaagttttttggcaatggcaggcgttttataccccgcatccaccgcgacaacctttggttggcacactttcgttttcaattgatcaaacagttcgtggaaaacctgactatcgtggacattcgccggttttacgatcgttcctaaaacaaatccattggcatcgcaagccgtatggaaattgtaggcaaacatcttttcccgctcgcttttgacgtaataaccgctctcaggatcggtggtactttccttgacctccctcgacgggtctttttgcgagggaggtaagggcttttttccgtttttcacccgttccccattgatttcttcttctagttgagtttgataggcacgcgtctcggtgcgtacgacctttttgcgatgctttcgtttattggcgttggctttaatggaagtcgagtcgataaaagccacctctggactcacaaatcctttgtccatagcttgtttcagaatccgataaaagagttgttcaaacacatcactgtcccggaaacgacgaacgtagttcttcccaaacgtagaaaagtgggggatcttatcctcaaagccaaatcctaaaaaccaacggtaggccacgttggtttcgatttctttaatcgtttggcgcatcgaacgaatgccaaagatgtattgaatgaaaaccattttgatcaacaccacgggatcaacactcggccggcccctgtcttttgagtaaaggtcttcgacaaggtcataaatgaaatcaaagtcaatcgccgcatcaagcttccggacgagatgatcctctggcaccagcttttcaatccagaccatttccatttgcattcgcttatcttccaactgtttggacaacattcttcctcaccctgtacctttttttctctcttttattgtacaaaaaagcctgtcgactgtctcggtaaaaccgagactttgtcgacaggctggaactgcctgtaaatcaggcagtttttttattagcgccgattcatgcattttttagcagcgggacgagagcggcggttgtgatgattgcttttttgggccatccaagaaagaaagtgctgttctttttcggacaatggccgtcgcaattttgtttcaaaaagttgttcaagttcctttttttccatgctattcacccttttttgttgtaatggtttacttatatgaccaagatggttgtcgtagacgtcaatcggagcagaaagtgaaaaaattggcgaatgccggctaatggaaatggtttaaaaagtaagaattcaggcaatagtaatagaaaaaaagaggtgaacaaatatgaggcgagtaggaaaagtatcttttgccgaattggtgcggcaaaaccgtgagcgtcttactcaagatcgggaagcaatggagcgtttggaagcacggtttgaacaaaaacactcaatgccaaaataaggaagcctcggtgggcgctgcattgggcaagctaaactcatggaggggatcacatgggagacaacaatcgatttgcccaatttacgcctgaccacttaggcgaacaatcacgcaaatcagatcggaacaacggcaaaaaaatggccaacaagtccaatgaacagccgaactatgttcctccaaaagggtagttcccttaggtacacttttgttgaccacatcatagagattggtctgtagccgccaaaattggcggcttttttgacgtttttcgctcagtttgagcgctttgctattcacggcaacaacaggttgctatgatgggggtagcgatttttaatggaggagagacatgattgatgcaatcttaaatatgctgctctatacgcttttggcgtttacgacagggatttttaccgtcgctcttgcccctggcgaacgggggctccgtgctgagccaaaacaacaaacggctgcgctgatgctaggcgggattgttgttgtgttatttggctatgtagccaaattggcggttacttatgccgatttttttgctatttcctaccttgatgcgcttatgaccgtcattgctgatcatgctgttggcgctagttttctatatgggagcttgattgtcgtgctcatggctgttgtatggcttgcaatggcaaagaatacaccactgcggcctattgccgcaggtatcaatcttgtgttcattgttttgctggcatttgcaatcagcctgtcaagccatagtgcttctctaaacggcttgcacgggatgattagcagtagtctccatatggtggcgatggctttttggattgggccattgctcgtcatcggtctttatggaacgtcactaatcaatgcgttgaagtttcatcaatggttttcggttgtggctgtttttagtttgctattgcttgtaacaagtggttttatcatgatgggggaaattgcaccagagtatgtgaatagctggatgctgtcgtatggccaattgttgctcatcaagcacattctctttattccgttgcttgtctttgggtttcggcatttgctatctttaagcggaaaaggggccaagctatcgcccgctgaacgacaaaaatcctttcgtgcagaaggggtgattgcgcttctcgttttcatagtgacttcttggctaaccgaaacagagccgcctcataatgtattgcgaacgttgcagaacgaaccgatgagcccactaatggactggttcttgcaagaacctttgttagaaaaccagctgatctcgttctctccaggaattggcggcgtcttgttgctcgttgcctcagcaatcctgcttgtaggcgccttagttgcagcatggtggtttaaaaagacagtgatcgtcggagtgctgctagtcggatggacacttgtcacttacagcgggctaatgattagcgcaggccctggcgacattccagtgaacttgacggtacatgatacgattgaagaagcaattgcggtcggccgtgataacgaacaagtagagctactggccgtctttgaagaggagcaagaagaagtttttgctgtttaccaaatcaatgaacgccatttagcggcggaacggttgaaagtggaagacgatggctaccgcaagtatttggatgcttccgtagaaattgaaaacggctttttaacaggcggtgaccaatttatggacacatttatgtttacaacaaatgattgggtagacaatgaacgggcaagtacgtatgtttctttagggtatgcagataaagacattgaatcagtagaaatcgagcttgatggcgagtggcgcgatgcgaacgttaaaaacaatgtctttattcatgtagaatcgaccaatgaaacgtttccagaggcccatcgttacttaatcaaaccgattaatggcaaggatttggaagtggaaaaacgccaatttatccacgaagggcattcccattaatagaaaggaaggaactagcgtggcgcaagacagacaacaatccatccaggcagaagccgcgctctggcggaaacgtttgacaagaaacgacgcaaccgagcccatgtctgcaaatgaactcgtagagctagctcggtaccggttcgagcggcgcaaacagcttgacttgtttgtgcaccaatggttaaaggaagcggaggaaatgggcgcgtctaagcaaatagtccaccagttaaagcagcgtggccaagcaacagagtgggcagaagctgaactgatcccgaaacaatggccacacctccgtgaaaccgaccaacttcgcggcaaacaacaagcgattgctcgggttcaagaacaagcaaaccggtttctagcaaattgggagcagacggaagtggcaggcaatggagaacttgaggacgttgtcagcgcatttcgcgatcaagcgcaagctcttgctgatacagcttcccaactgcttgaaagctttcaaggtcaatactattcaaagccattgtttcaaacgctaaaacaacttgtggctgaggcgacaacgcttggacagcgattttatgaacaggctgctcaattggccaagtcgcaagagcatcagtctgctttagcagagctcgatgaaatggtcggccttgcagacgtaaaagcgagaatccataagctgtacttgtttctaaagtatcaacaggaacggaaaaagcgtggactgcaaacaaaacagctgctcaatttgaatatgatcatgacaggaaacccaggaacaggaaaaacgactttagcgaggctgcttgctaaaatttattatgagttgggcattctctctaaaccagaagtgtatgaagtagaccgtgcccaactggttgctggttacgtcgggcaaacagaagagcaaacaatggcagccattgagcgtgctgctggcggcgtcctgtttattgacgaagcgtacagtttaaaacgagctgggcaaggaggcaatgattacgggcaagcagttattgacacgctcgtatcggcgatgacaagtggcaagtatgcaggcaactttgctgttatccttgcaggctatccaaaagaaatggctacgtttatacgttccaacccggggctaaggagccgttttccagaacaaaatcaacttcatttgcaaaattacgcggaaagtgaattgctggatatagccgaaacaatcgcgctggaaaacgactttgttttcaccgaacaagccttaaaaaaagtattagcggaaattgaacgagcaaaaatcgaccagtcgtttggcaatgctcgtgttgtcgaaaacattgtccgcgccgctatttttgaaaaaggggcttctggcagtggtgagtcagaggcagatttggtattgcttaatgaaacgcatattcaatcgacaacgcctcaacgagccgaagatgctctttcacgccttgatgcacttatcgggctcgaagaagtgaagcgcgaagtaaaaaaactgactgcgtacgcgaaagtaaaagaagcacggcgtgacatgggcttagccgtaccgccgatgccgctccataccgtgttttcaggggctcctggcacagggaaaacgacagtagccaggctttacgcggaagcgctaaaccaaattggtttgttgaaaaagggccatgtagtcgaagtttctcgtagcgatctcgttagcgggtttgtagggcagacggcattgaaaacagagagagtgattgaagatgcccttggcggcgttttgtttattgatgaagcgtattctctggcgcaaggcggcacgaatgactatggcaaggaagcgttgaccgcattaacgcaagcaatgacgacctatgaagccaacttagttgttgtctttgctggctatggcaaagaaatggcgcagctgttaacaagcaatccaggtctccaatcgcgcgtgcgcaaaaccattcattttccagattatacgcccgacgaacgatacgagatgctacttgccaaagcaaagagctatcggtatgaatggtcgcaaccagcacttgatttactaaaaggtcattttaagtctgcgaataggggaggcaatggtcgctacgtcatgaaagtgtttgaagccatcatccaagagcaggctctgcgtgtggcagatgcagaggtcggccgacctggatttatgcaaattgagagagaagatgtagagcgagcattgttaaacaatgatcatgaacgtctatagcaatagcccctctagcgaatcgcttttggggctattgctttactgcgaaaaccagttatgtgtaaaaaaggggtttagttgttaggcgaacggttatttataaaatagtggagagattgaaggatgataggactatgaccttttacttatagtggcgtttataaggcaaagtgaggtggaattgtttttaggaatagagtgacctgtgttatactgatggaaaactcgagtaaagggtttggtgggagaaaggaggggaagtagtggcccataaagtgcaaacaaaaattgttcctcagtatgctgataccgatatgatgggcgtcgtataccatgcaaactacttgaaatatttcgaacttggtcgtaccgcttatattgaagatgccggttacagctacgtaaagatggaggaagaaggctactttgctcctgtgtatgatgtgcaagcaacttaccgcaaagcgcttcgctacggagatacagcaatcgtggagacgcgtctttccctaaatgacggcgttaaaaccgtttatgcctacgatattacgaaccaaaacggggagttatgtgtaacagggtcgacgacacatgtgattgtgaaaaaagacacgttcaagccagttccttttaaacgggcgttccctgagtggtaccaacgttatgaagaattgaaggagcaataaaatggcgtttggcattaaccgtacggaactagaaggctggaaagcgaaagcacgagcaggggaaattgcgtttttgacccattattggcatgatccacgctttccgcaggcgactactgttacgaaggccgcttgcgtcgatgtctcgaagttaattgaatggggcaaaacgtacggattaaaccctcagtggatcgaccaccgcaacgagtttccccattttgacttgctcggggaaaagcaagtcgccattttagcagccgagggaaagttagacgatttgctccgtttccataagcgattttacaacattggaggtcttatgatgaaagtaaaccaagattccattcgtcgtgacttacatacgaaagcagacattgatccaaaagaagaaattcgcacgcgcgttgactttttgaaaaactacactcgaaaagcagggacaaaaggatttgtactcggcatctcaggaggccaggattctacgttggcagcaaaactcgcgcaaatggcagtagatgagctcaatcaagaagctccaggcacatacgaatttcatgccgttcgtttgccttatggcgttcaacatgatgagaaagatgcccaagtggcgctgtcgtttattgggcccgataaaattcatacggtgaacattaagccagctgttgatgctgccgtcgcctcttttgcagaagcgacaggagaagagctgtctgggtttataaaaggcaatacaaaagcgcgggaacggatgaaagtccaatttgatttggctgcccactaccaatgcctagtacttgggactgaccatgctgctgaagcggtgactgggtttttcacgaaatttggcgatggagcttgtgatgttattccgttatatgggctgacaaagcgacaaggcaaggcgcttcttcaagagcttggtgcgccggaggcactgtaccaaaaaatcccgacagccgatcttgaagacgacaaaccagggttgcctgacgaagaagcccttggcatgacatatgagcaaattgatgattatttggaaggcaagcccattgacagcgccatacaggaaaaattagagcagcgttatgcggaaacagcgcataaacgcaaagacccggtaagtgtatatgatacatggtggaaaggctgatcgaacacgcttgtcaaagcgcggcaaacgacaatgtatgcgagcgtttggctacagtctgggaaaggctaaaggtctttctcccgcttcttcttgttatgctttatgctgtacaaatcagacatgacgagcgtacgaggttcatataaatagggttgtatgagcatgtatgatagggagagaaggaaaaagatgaaagaaaaagtgctagtattgctaggcttgattgtttgtcttttgttgatagtcggttttgcgacgaacggcctttcaaaaccagaaacggtccaaggcaacgcatccgatcaagaagagagcaaacatgagtcgcaagagatcagtgatatcgagattacgttaaatggttattctgtaaaagacgagaatgaggaagagctgttagtcaaagtcgatttaacgattgaaaacaaacgggagtcgaccgttaatttttcgttaatgaatttgacattaatggacagtgaacattatgcgtacagccatgaatcaaatgtcgaaacaaagggcattctcggtggtcaaatttctccagggcggtctgtaagtggcgaagtggcctttattgtcccgagagatacttcttatgaacttgtttatacagatcattttcggacgggccaattgttttttccaattgaagtaacggactaaggctatgcgaatgcatagccttagtccgtagacaaacgtccgcatacgttgtcgcgtggcgagtgttttgtttgcgtctgaacgaggttagcgactctgtcgacgctatcactattcttgaaacgctgtccttattgcgttaagatggttaaaaacaaagatgcgggagcgagttgccatgccgataaaaattccagaccacttacctgcgaaggaaattctgttaaaagagaatatttttataatggatgaaagtcgggcgtacacacaagatatccggccattgaaaatttgcattttaaacttaatgccgactaaacaagaaaccgaaacgcaattgttgcggctgttaggaaacacgcctttgcaagttgatgtttctttgttgcatccaagcacccattcgccgcgcaatacatcaaaagaacatttgaatcttttttataaaaccattgatgaagtgaaacaacaaaaatttgacgggatgataattactggcgccccagttgagacgttgcctttccatgatgtgaattactggaatgaaatgacgtctatccttgattggacgacaaccaatgtcacgtcgactttacatatttgttggggggctcaagctggtctttatcatcattacggtattaagaaaaagccgctaacgacaaagctttttggcgtctattcacataagctagaggtgaaaaacgtcaatttgctacgaggctttgacgatgttttttacgctccccattctcgccacaccacggttagccgcgaagacattgagcgtgttgacgagctgatcgttttaagctcctcggaagaggcgggtgtctatatagcctcttctaaagatggaaagcgtgtatttgtcatgggccactctgaatatgatgcacatacgctaaaacaagaatacgaacgcgacgtaaagcgtgggattgcctgtgatccgccgtttaattattttccagaaggcaatgtcgatgcgctcccacctttgcaatggcgcgcccattcgaatttattgttttctaattggcttaattactacgtatatcaagaaaccccataccatttagatgattaaaaaccgagcaatcggtttttttttcgtgttcgtgcgaaacactaatcaaaaaggggggggctggttgtgcaaaaggttcggccagatcgtgcatcgtatctatacattcagggagcaagcgtttattttgaatactaccgttgccaagcgcaagaagcaaaaggaacgttgcttttgttgcatggttttttagcgtcctcagcctgttttcatcaattggtaccttatttacacaaggattatcacctgatcagttgtgatttgcctgtgtttggccgctcaagtaaggcaccaggaacggcctattctctttatggttatgcccgtcttgtcgttgaattggcagctaggctcggccacgcacatgtgacaattgttggccattctatgggcggacaagtggccttgcatgcggccaaagcattccctgatcaaattgaccgccttgtgctgttggcaagctctggttatttaaaccgtgttaaaagaacataccgcgctatatcgcatttgccttttgcagccccggccatttacgcagccattcgtcgccaagatgtgcgcgcctttttgtgtgaagctgtctacgataagcgggtagttacaaaagcaatggttaatgcatatactttgcctcttagcgacgcctcaattggcaagggattgatcctacttgcacggcaaagggaaggtgatttaacatctgcagcactgcataccattgccaagccttgtttaatcatcaacggacgagaagaccccgttattcctgtacaaacaagtgtacgtttagcaaaagacttagctaacagccaactcattttgctaaagcgatgtggccatttgttgccagaggaaaagcccagccttatagcaaaacatatgaaacggtttctgagaaagacataagcgcgtatttgaacgataagagtatggtacaatgggtgggagaggtgattccattggacccgctagatattatgatgaacaagaaccgggttatccctttttttcttccgatcgtaagtgcagacaaacagcaagtggttggctatgaagtccaaccttattggatggaggcaaatgaacggatcaagttgaactggtttttcgaagatagaagcattcctagcgaataccgcctcgaactagaagacgatttgcagaaaaaagcaattgacttgtacacagccgaaaacggaaaaaaaatgctttatttcaattatgatgtcaggctattaaaaaaacaagcaggtcagatgctgttggaccggctggaagcaatgcagcaactcggcatccccttaaaacgcatcattgttaacattgtgtgtgaacagagcgttgaagagttgctggaagtgaaacatacgatggtctatatgcaaagtttaggcgtgcagcttgcagtgaatgccgattattcagcagccaaccaactggagttgttcacaaaactaaagccaaatgtcatttgcgtcaactgctcgtttctagaagaaaatttgttgccagggatgtatcgagatgtccatcagccgttggctcttttcgcccgcaaaattggcgcaacccttttgtttcaaggggttgaaacgtttgcgcagtttaattatgcgtggcgcagcggtgggcgctactatcaaggtccttatttccaacaagcaaccaaagggtttgtcgacgaaaacagctttaaagacaaattaaaaaaagatatgcatcactttatccactatgaaagagaaaaaatgaaggcgcaatttacgctgtctaaccaattgtcgcaaacattaaaacaagcaatgaaggacttgaaacaagaccaaggctacgatgaaattgttttaaacgtggcaaaagcgttaaatgcttatacattccgcgtctacatttgtgatgaagacgggatccaacaatcagccaatgctgagaaagatgcagaaggaaattggctgcttttgaaagaaagccgcgctaaaaactggagctggcgcccttattttcttgagaacattgtgcggatgaatgtagagaaaaaagggattttatcggatttatatacagatattgaacgagatgagcaaatccgtacctattcttatccgcttaacgacaagctttatgtttttgttgacattccttatgcatttttgtttgaacaaaatggattgttgtaaagcatcgagcgggtcaagttagccgcaggaaggagaaggaatgaacgtttcgataacagctgcagcccatacgtatttaagcgaacgagggcatgaagtcgtccgtattgccgccaaggatacgtatgaatgtagcacaatggtggagtactttatccaagaaggaattgtggaagcaggcgaccaaaccgttgacgttgaaggactcacggtgatttataacgaaaaagcagaagcggaaattgggaacgaagttaaagtagactatgtaccatcacagggactaaagttagtggcaccaactggggtgctagcctatgcccagcgagtccgttcaagctcgatgccagcagatggtggcgatagccgctgtgggcggtaaggcatttgtgccaggcagcactttagcctggcacgtgctatctagtgaaaaaactgctaattcttgatacatacggcgacacttgctggaatgtttttacaaatttatcgactgaagtcgctgttcgggagaggtcgaattttccttcatcgtctgtaaacggagctttccagatcgacttctttttaggcgccgcctgttgcgggaatccgctttgctggaacggttgtggcatttggtgataaggtcggtgctgataagggggatgttgaaaaccaggctgttgccgttgcataaacgcctgattatggctcatctgctgatgatgggggcgtcgtggcgcaggaaacatggcatagcctcctttcatttaattgaaatcgttttccgctttcctttaatgacgatgcgcagcaacccattttcataatgggcttgaatgtcctcttcggtaaaaggaaatgggacaggaatcgcgcgctcactcttggaagaagcatgttgtttggtgattagtttcgtctcgtcatcaatggtcgtgatttcgcccttgtgtcggacacggataataagtgcttgccgtagcgattccaactcaatttgctcttttttaattcctgtaagttcggcctctatcacaaaacggtctggttcttctttaatacgtaccggtatggaggaaccaaacaattgtgttgaaaagttccgaaatgccgactgaaaaaactgatcgattgacgccataaagtcatggccgccccctggtttccgtgggaaatgttcagacatcatcaaacctccatcccttttaactgctctataatatgagaaaagggaaagaaaggtgatttgacatgaagataattgatacacactgcgatgctctttataaactgtggcgtgatgaggacaaagcgtttgccgatgacgaagacatcgcgacaaatgcagcaaggttaaaacaagggaatgtgtttgttcagttttttgccatttgggtgccgtcaactgttccgcaagaatcaaaatttcaagtggtgcaaaagcaaatcaatgcattttatgagcgtgtccttgctgtgccgaacatgaaggcgattcgctcattggctgaaatctcttccttgaaagcaggggaaattggtgctgtccttgctttagaggggatggatgccttaggagcagatatgggcaaattggaatggttgtatgagaaaggggtttcctccattggcttaacatggaacgacgccaatttatgcgccgatggcattggggaaatgcgtggcgccgggctgaccgaatttggcaaaaaagtgatcgcattgaataacaaacaccatgtgctgaatgatgtttctcatttaagtattgctgctttttgggatgtccttgaatgctcaaaaaaaacgattgccagccattcaaatgcgtatgctgtttgccgtcatccccgcaatttgcacgatgaccaaattgatgcactgattgcaaaggacagtttcatcggcgtcgtattctaccctacttttataaaaagcgagctgggcgcttctattcacgatctcatttgtcatattgactacatagcaagccggggcggggtcgaccatatcggttttggttcagactttgacggtatttctattcatgttgacaagttagagcacgcaggcatgtatgaacatttagtaaacgaactattaaaacattataaagaatcggaagttgaagggttttgcaacaaaaatttcattacaaaagcaataggcagataaagcgtcgggatatcaacggcgctagtacaaaattctctatttttactggccgaggctaaaccgctaaggtagaagcgccgatatattaggatgaaggcttagttcggagggaatcgtatggcgcttaacatatttcaaacggaagagcaacgttatgaccaggagcttgttttgtttaaagcaggacagtctacctatgcattaaatgtattaaaagtaaaagaaattattcgaccagttccagtaacggaatcaccaaaccgacatagcatcgttgagggcgtcattcaagtgcgcggccaagtaattccattaatcaacttgtaccgcctcttggaaatagacgaaagtgaaacggtctattttctcgtaattgagatgggggaacaattatttgcgttaaaaacgggacctgtctcccatgttcaccgtactcactctagcataatcaaacaaccagatgctgtcacaaaaggaaaagaagcgtttgtgagcggggtgattccgttgccagacaatggcgttgccttctcccttgatttggagaaagtgcttcactttatccaaccgtctcatatgcaaggggcaatggcaacggacgagcgccgtcgcaactacccgcttctattagtagaagactccaaaacgttgcgttcacttcttgttgatgcattgagagaggctggctatgaagacgttacaacattcgataatggaagggatgcgtctcgttatttgacggatgatgcatgcccactatatgaggcgatcgttaccgacatagaaatgccttatatgaacggccacgaactgacgaggcatttgcgccaagacagtcgctatcaagaaacccccgttattgcgttctcttcgctagacaaaggactgatggaacgaagaggggaagaagccggcgtaaccgagcatgtggccaagccagacatccatcaactcgtcgatgcccttgatcggcaactattggaaaaaaagtgagtccatttaacggattcgcttttttggttttagtaactctagctgctcagttgtaataagaccggctttatggaggaggcatgcataaaggtaatgattttttttaacgaacatgctgtgtcactccttttcaaacagtttattctcttatgcaaaaaagtttctctgatgcaaaaaaataggctgctaaaagccggattttggacggttattaaaaatcttggtatgatagaaagacgaagcaagactctacaaggaggcaaactagatggaaattaaggttacgaaacctgcgataaattggtttaaacaagagttttcggaagcagaagaacctgtcccgattcgattttatggccgttatggtggctgcggatccttgcaaagcggtttttcattagggatgagccaaacggaaccaactgaaccggctgttgtttatgaagagggcggttttttgttttttattgaagaacaagatagctggtattttaaagatcagcttgtccgggtgaaatatagtcgtaagaaggacgaaatcgaatttgaatatgaacaacaagccaaccgcgaacaataggcagtactagcaacattctcatgtgaaagaatagaagtgaaaaggaagaaatggggaatgaaaattggcaatcgagaaagcaatgtttgcaggcggttgtttttggtgcatggtccagccgtttgatcagctgccaggcataaaagcaattgtatcaggctattcaggcggtcatacgaaaaatccgacttatgaacaagtaaaaacgggcgaaactggacattatgaagtggtagagattacgtatgattcagaacagttcccttacagcaagttgcttgagctgtactggccgcaaattgacccaacggatgatggcggccaattccaagaccgtggaagtcagtaccgcacggctattttttattatacagaagaacaaaagcagttagcagaagcgtcgaaagcagaattaaacaatagcaaccgctttaacaagccaattgtcactgcgattcttcctgcatccacgttttatcgggccgaggaagagcatcaagatttttataaaaagcagccaaaggcttataaacaagaccgggcgcaaagcggaagagacgaatttatcgcaatgaactggaaagaaaacaaaccgagatagccgggaaggaggcactcatggagatgttttccaaatctgtcaaaaagggagtagcggtctttgctttggcggccgttacgatcagcttaatctcgattttttttgtgcaaagctggcgctatacagaagcgggaaaagtgcctccaaaaacggctgtgttgcttcacgccgttaacaaccggcttttgcctgaagggaaactggaagcgcctgcttttttagcagtcaaagcgccgccaacgattgaacgtcatcaagtcacggttccgactagggatggggaagacattccagcgactgtttatcagcctatcgctgctgggccacacccgatcattgtttactatcatggaggcgcgtttttggaagggtacggcgacttggatactcatgacaatattatccgttcgctcgcagcccgaactggtgctattgtagttgccccagcttatcggcttgctccgacttatgcttttcctacagcggtaaacgatagttatgatgcccttacctgggcttatgagcatgcagacgtgctagatggcgatagagataggcttgcagtggctggcgatagcgctggaggaaaccttgctgcagctgttgctatcatgtctggagaagaaggcggtcctgccttgtcaggacaagcgctcctttacccgttggctacttttgaagatacgaaattcccgtcacgtgacatgtatgcaagtggcttttattttttatcccgggccgttatggaaatggcgcaacaatcgtatgcgcccaatgaagcggattggacatcgccttacacatcgcctcttaatgctgaagacgtgtcgatgatgccgagcacgcttgttataacgggcgagtttgatccgttacgtgatgaaggggaagcattggcaaaacgtttgtataatgaagggatctatgtacaagcacagcggtttaatggagtgatgcacggctttatctctttctatgaagtgatggagcgaggggacaaagggctgcaatcagcggcggcttttttgaaagaggcgctaaacaaggaattgcctgagccacaaaatagccagccatttgcagttgaagtgatcgacggccgtgattcttggcgagatgaggcagaagcgtatgtgattggcgtgtatttattgtttaagcacatgatccaagtatttgaataaaaaccagcccggcaataggggctggtttttattggaactgattatttcgtgcaaaagcgacaaatgtgtcttcagcctcgtttaatccacacgccccacattggatgcgaatcgatgggcctttgtatggcatatggaaggcatcaagtgaatcttcgctgtacgtttcaacaatttcaccagtttgtggacttaatttgacaggttcaacttgttgaacgatgcggtggaaccttgtccggttggttttgcactttggacataaatatggatcattcatattatcactccttacgtttagtatggacaaaaaaagggaaaggcatgattggttaacaagaaaagtttgggaaagttgtgtctgcttctcaacttttttttgtcgaatttatgataattgttggtaaccgctttaatagcagagctttttttaagcgaaagtggtaggatggagtacagctatgttgctggtttctgcttcacaaagtatacatgcaacaattagttattttgccaaaagaaaggtgattttattgcgtacaccatcgaaagtctttaaatggtttgctctagcgatggtcggtctctttctgagtggttgtgggaatttgacggtccttgacccacaaggtcctgtagcggaacagcaaagcgatttgatcatgctatccatctggtttatgattttcattgttttagtcgtgtttgttttgcttacagtcatgattgtcaagtaccgtgaccgaggaaacaatgacaattacgatccgtcgattgagggcagccacaagttggaattcgtttggacgattattccaattattattgtcaccattctttctgtaccaactgtcataaccatttataatttggaagaagctcctgaagtggctgaaggcagcgtccaagttgatccgcttgtcattcacgcaacaagcgtaaactggaaatggatctttagctatccagaggaaaatattgaaacggtcaattatgtcaatatccctgttgatcgaccagtccagttcaaattgacttcagcagattcaatggcatcgttttgggtaccgcagcttggtggacaaaagtacagcatgtcgggcatggaaacagaattgtttttaatggctaatgaaccaggcacgtacaatggccgtaatgcaaacttcacaggcgaagggttcacggagcaacggttccttgttaatgccgtaacagatgagagctatgattcatgggtggaagaagtgcaagcggaagcaccaccattgtcagaagaagaatacgcacatctaatggttccaggtcacgctgaagaaatgacattctcttcaacacatcttgagtttgtcaaccatgcttatgatccgacatacgcgcttgagaaaagtgcagaacttggatatgagccactaaatccgcattcgagagaaggcaaagcgtacgaaatgccaaaactgacgcaaccaattgacacatcaagaacatataaagtggaattggatgatgagtaatggcgcaaacaacggaagagaggggatttaccgttgagatgggatgaatttattgtaacgggagacccgcttatacttggtgcgcaaatttccatcgctttatcaagtataattgcaattgtcgcccttacttattttaaaaaatggaaagtgctctggacggactggatcacatccgttgaccataaaaagatagggattatgtacattgcgtgtgcgttgttaatgcttttccgcggtggcgtcgacgcaatgatgatgcgtttgcaattgaccgccccaggcatgacatttttaaacagccagcattacaatgaaattttcacgacccatggcacaatcatgatcattttcatggcgatgcctttcctgattggtttaatgaacgttgtcgtgccgctacaaatcggcgcgcgtgacgttgcgtttccattcttgaacaatttaagtttttggacattcttctttggaatggcactttttaatatttcttttatcattggcggttcgccagcggcaggatggacatcgtattttccacttgcctcgaatgacttcagtcctggcgtcggtcaaaacttttatgcgctcggtcttcagctttccggtatcggaacgctagccacagggatcaactttattgtcacgatctttaaaatgcgcactaaaggcatgacgctaatgaaaatgccgatgtttacatggaccgttttaatcacgtcaatgattattgtccttgcgtttccagtgttgactgtagcgctagcaatgatgacatttgaccggctgttcggcactgcgttctttaccttgcaaggccaaggccttgatatgctttgggccaacctattctggatttggggccaccctgaagtgtatatcgttattctcccggcatttgggatcttttctgaaattatttcaacgtttgcgcgcaaaaagctgtttggctacaatgcgatggtcgcttccgttgtaatcatttcgtttttaagtttcctagtatgggtgcaccacttctttacaatggggaatagcgcggctgttaactcgtttttctcgattacaacaatggcgatttcaattccgacaggtgtcaaaatctttaactggctctttacgctacacaaaggaaaaattagaatcacggtgccgatgctgtggtcgcttggctttatcccgaactttgtcatcggcggggtcacaggcgtaatgttggctatggcagcagctgattaccagtaccataacacgtatttcctcgtgtcccatttccattatgtccttattgcgggaacggtgtttgcctgctttgctggtttggtttactggtatccgaaaatgtttggccatcgtttaaacgaaaaaattggcaaatgggtcttttggatttttatgatcggtttcaatatttgcttcttcccgcagtattttctcgggcttgacggcatgccgcggcggatttacacatacttggaatccgacaattggttttcgcttaatgcgctctccacagtgggtgctttcatgatggcgattggatttgcgttgttcgtctataatatttactacagctggcgttatgaaaaacgcgatacaacgggcgatccatgggacggccgcacattggagtgggcgacgtcttcagcaataccgccattttacaactttgccaaagtccctgaagtagcggaacgtgatgctctctgggatatgaaagaaaaaggcattgatccaaatgccgatacgaattaccagaaaatccatatgccgagcaatacatggcttggaccagtgatgagtttgatcatgttcattgcttcctttgccctcgtatttagttggttcccgcttgcgattataggcggtattggaattttcatttgcatgatcatccgctcctttgattacaacgacgggtattatgtaagtgtagaagaaattacagaaattgaaaataaagcgagggaggcgtaaaacgtggcagcacatgaaacgataaatccaaacgaaccacttgaatatcaatcagctgaaggtcgcaacaatatcctaggtttctggatttttcttggcgctgaattcgctttgtttgcaacgctgttcgcctcgtattttgtcctcgttgacagaaatgccggggccgtgccatctgcggaactgtttgatttaaaccttgtgttaatcatgacgtttctgcttttgacaagttcgtttacttgtgggatcgcgatccatgaaatgcgtgccggtagaatgaatcaaacacttgtctggattggtttgacgcttttactaggccttggatttgttggctttgagatatatgagtttattcattatgtccatgaaggggcgaccttgtcggcaagcgcccattggtcaacattctttgtgctgcttggcacacatggcttgcacgtctcgatcggcatcggctggattgtgttgttggcgattcaaatgctaaaacgcgggtttacgccgcggacaacgtctaaatttttcattgccagcctgtattggcactttttagatgttgtatggattatgatctttaccggcgtatatttgctaggaatggagtgggtgtaaatggcacaggaaaaagaaacagcagccaaccaccacggttttccttggaaacatgtgattggctttgtgctctcaattgtcctcacgctactagcagtatgggtaatgtcgcaaaccaatttggcttgggatgtacgtatcattattgtctttgtgtttgcctttatccagatgacagtacagcttcatatgtttatgcatataggtgaaggcaaagcaggttacgtgcaagtcggccacacatggtttgccattatcattgcggtgattattgtaatcggttcttatctagtattgagaacgggccacatttaaagaaaaaagcgcattcccagagctggaatgcgctttttttattcagtcgactgtgtaaaacgccttgatttgctgcggaggtgtgggtaaacataaagaacaagggcagcaaaatgggcgataaagacgttgatcagaaacgctgtgacaaatgcagagtggtgaaggtcgaacaaaaatccatcaaaaatgtgggcaagggctagcacccacatgacaatgataaacggaatgctggcaagggcaatttttcggtgttccagccacaaaaataatggcgtcgcgctggcgacaaacatataggcgaaaaacaaatccatttgaaccactcctttcccaagtattccatctttgtgaacaatagatgtcaatattgtgtctgttttgtgtacgtttatactatcacaaaatcgacacaattgaaagcgtttgctattaatttgggcgacgttttttgctttggcaaatgggtatggtacaatcaagcaaatcagttaagggggagcctatgatgaaacggtatgaagtcgaagtaacaggaagagtgcaaggggttggttttcgcgcttttgtggaacagacagcgagccaatatcccgtaacgggcacagttcaaaatcgcccagaaggttccgtggtcatccaagtccaaggcgaggagactgaaatagaacagtttttagcaaaagtcgggcaaggtaaccattttgcaaaagttgaacatatggagaagaaggaaattcctaaaaaagaaaaggaggggcgtttttcgaccatctactgactactatcattgttgccaatttcgctttaatcagcgagattggttttttttgtagacttctaggcataaattcactaaactaaatttattcaatttaaaaagaaaaaaatcgacaaaagggggcatgtttgtgagtttcagtagcatagtcgatgcaattaataatgtagtatgggggccgatcacattgttcctcattgtaggaacagggatttatttgacgattaggcttcgttttttgcaaattagggacttgccttatgcattaaggttgacgtttggcagaagcaaaaagaaaggaaagagtggagaaggggatatttcccatttccaatcattaatgacggctatggcggcgacacttggcattggcaatatgacaggtgtggcttcggcgattcttttaggaggcgttggcgcccttttttggatgtgggtcgcggctttttttggaatggcaaccaagtatggggaagcgattttagctgtcaaataccgtgtcgttaaccataaaggtgaaatatctggcggcccgatgtattatcttgaaaaagggctaggttggaaatggcttgctattttgtttgcgctgtttggttgtttggcgtcttttggcattggcaatatgacacaatccaatacagtcgcaagttcattggcaaccaactttgacgtcaatccatgggtaacgggctttattttaatggcattgacaggtttggtgttacttggaggaattaagggcattggccgtgtatcggctgtatttgtcccatttatggcgctcttttatatgactggcggcttaattattatcgtaatgaatattacacacgtacctgaagcatttgcgacgattttccgtgaagcttttaataccgatgccgctttaggaggcacaatcggtatggcaattcgttacgggattgcccgcggcgtattttcgaacgaggcaggcctcggttcagcgccaattgctgctgctgccgcaaaaacagactatcctggcaggcaagcgctcgtctctatgacgggaacctttcttgatacgatgattgtttgtacgattacagggctgacgatcgtcatgagcggcttgtatattggccgaccaagtgacgaccaagcgctcattacaggagaagcgtttgagtttttccttcctggcgccggtaattatatcgttgtattcggcattatcttttttgcctattcgacgattattggctggtcttattatggtgaaaaatgtttcggctatttattcggtgataaaaatacaattatttacaaaattattttcgtggttgtcgtcatgattggcgctggtacaagcgtgcaaattgtctgggatattgctgatatctttaatgggcttatggcgattccaaacttaattggtctgttgctactttccaatgtcattgttaaagaaaccgataaatttaagcaagtccgtttgcaagaacgacagcaggcaaaacaaacgagtaagcaaatagtcagttaggactcgtacgttcataaaacgaaaagcgatgtgcagccagcacatcgctttttttaacgggttaaattgcccaatcgccgttgcggaacacaggtactcggttcccgtctttatccaccccgtcgatatccatatcggcggcgcccatcataaaatcaacatgggtaatgctttggtttaaaccatttttttcaagttcttcagggctcatcgttttgccgccttcaatattaaaagcataggcgctgccaagagccaagtgattcgacgcattttcatcaaaaagggtgttgtaaaaaataaggtttgtgtctgaaatcggcgaacggtgtggcacgagtgcaacttcaccaatgtagcgtgccccttcatcactgtcaagcaggcgtttcagcgtttcttcccctcgttcagccgaaaaatcgacgacttttccgtttttaaaggtcaacgtgaaattagtaatcagcgtgccgccataattaagtggttttgtgcttatgacagtgccgttaacaccatcttttttagcagctgagaatacttcttctgtcggcatattcgcaacaaagtcaatgcctgcgttgcttgtgcttcctccagatgtccaaatgtgggtttcaggcagttcaatcgttaaatcagtcccttttcctttgtaatggagggcatggaaatgatgctcgtttaatttgtttcttttttcatcaagtgtggcgaggtgttgcttccaagcagctacagggtctgtttcattgatacgtgttgccgcaaatatcgcttcccataactttgtcactgcttcttcgcctttcgcgtcagggaatactttttctgcccaactgactgtaggaacagccacaatcgaccagctcactttatcagactggatgtagcgtcggaatgtgtctaatgccatgccagctgctttgttggctctggcaacacggtcaggatctgcgtcttttaataagtctggatttccgccagttatacttaaaaaggcagcattgttgtctgcttcttcttcaagcgctttcgcttgccaatttggatattcatcaaacgcttcgtctggagcgagctcaaatttcattttagttaattcctcatcgctccactcgacacggacatgtttggcaccagcttcgtacgcttttttggcgactagacggacgaagtctgcggcaaaaagcggcgcacgcacaaacaatgtttgccctttttggatgttgacgccaacacgcacagccaaatttgcgtaattctcgactttttcttgaaatgacataacgaacgccttctttctgcacgaatgattttccttctatagtagtttaccaatttcatggagatatgcaaacaaatccacacaagaacatggtaaaatgaaggttgcacgataattagaaagaagaggttcgcgaactccctctataaaaaactaaccaattgttggagtatccgaatgctcgttctcaaaaggagaaatgtagcatgttagaagacaaagctgtcgtcgtctttagcggcggccaagacagcacgacttgcctattctgggcaaaggagcgttatcgttcgctccacgcagtcatttttgactatggtcagcgccacaaggaagaaatccagtgtgctgttgacatcgccaatgagcaaggggttccttataaagtctttgatatgggcttgttgaaccagcttacggcaaacgcgctaacgagggaaaatattagcgtccaagccggtgaagcaggggaatcgcctagcacattcgtcgctgggcgcaaccatttgtttttatcgtttgccgctgtatatgcacgggaaatgggggcaaagcacattatcactggcgtttgcgaaacagattttagtggttacccagattgtcgcgacgtgttcgttaagtcattaaatgtgacgttgaatttagcgatggacgaacaatttgtgattcatactccgctcatgtggctaaataaaaaagaaacatgggcattggctgataaaatggggcaactcgaatacattcgagcgaagacgctcacttgttatgaagggattcgcggagacggttgtgggacttgcccatcttgccagctccgtcaaaatggattggatctctatttgcgcgagaaggcaggtgcgggccaatgatccagcaaatttatccggcgccaatccattcatatcgctatgaactgaacaaagatatgcatgtggccgctgctcattacattgacgatgaacgggctggccgatgccaacgtgtccatgggcacacgtattttatcaatttgacgattgtcggggatgcccttgacgagactggattccttgttaattttagcaagttaaaacaagcggttcatggccgctttgaccatcgtcttcttaatgaagacacgctgtttgaaacggcccctccttctactgaaaaaatggcggagaccatttacaaagtcgtccaagagcagcttgatacttgtccaaatcggccactgtgcattcaagtgtatgtaagagagacgcctactagttatgttgtctaccggccgaaggagcatgcccgtggctaaattgattcccgttgttgaattgtttgggccgaccattcaaggagaaggaatggtgatcgggcagaagacgatgtttgtgcgtacaggcggatgtgattaccgttgtcgctggtgtgattctgcttttacatgggatggcagcgaaaagagtgaaccgttgtctgcagaagaaattatagagcgccttgattcactttgtgaaaatgggtatagccatgtcaccatttccggcggaaatccagcgattcataaaggcataggtgaactggtggcattgcttaatgaaaagggcgttgccacagcgattgaaacacaaggaagcatctttcaatgttggatcaatcgcgtcgatgaagtgacagttagtccgaaaccgccaagttcaggaatggagacagattggacaaagctcgatttgtttttgcaacaattacaagcaccggcggtaagcttaaaggttgtcgtgtttgatgacgcagactaccaatacgcgaagcatgtgcataagcgctatccaacagtgcctttttacttgcaaacagggaatgaagattttgctgaaaaagaggatcctcgctttctggagaaacgaatgggcgcttacgaagctctcgtcgaaaaggcgctagctgacaaggaaatgaacaacgtccgagttcttccacagctgcacacatggctatggggcaataagcggggcgtgtaggaggagatactatggcaggaagacaagaaaaagagcttcaaaatgtgacattgctcggcagtgagcaaacggaatacaaatacagttatgaccctcgtgttcttgagacatttgacaatcagcacccttatcgggattacatggttaaattcaattgcccagaatttacgacgttatgtccgaaaacagggcaacctgattttgcaaccttgtacattagctatatccctgagcaaaaaatggttgagagcaagtcgctgaagttgtacttatttagttttcgcaaccacggcgatttccatgaggacagtgtcaatacgattatgaatgacttaattgaattaatggatccacgctatattgaagtgtggggaaaatttacgccacgtggcggcatttccatagacccttactgcaactatggcaaaaaagggacaaaatacgaggaaatcgcgaactaccggttaatgaaccatgacctgtatcctgaaacgataacgaaccgctaatagacttgcaaaggggacgcggtgctttgacgttgccgccaatggcaacaacatcgtccacgtttgccgaaaacgctttgtcattcgtgtggagaggcgaacaagatgtatgttcatgagcaacgaaggacaagcgttaactacggactaaaagtgcaggggacagccctgcgctttttttgtatgaaacacaacacagagtcttctattgaagttggcccacgcctattatctgtttgtttgatgtttccaatagtagatcgccagttgggtgcgatcccgcagttcgagcttgtcaagaatgacagagagtgtattccgtacagtaccgacacttaaaaatagatgggctgcaatttctttgtttgaaagcccttgggcaatgcattcggcaatctcactttcccgctttgttaatccggcgagggcgtcggcatggggtttcaccaattgcttgagcacatcggcgtccagtacagatgaaccggcgcttaaggcacggatttgcttggccatattggctaccgctgtcgatttgagcaaatacccttctgctccagcctgcaaagcgagacgaatgttttgttcatcttggaacgttgttagcatcataattaacatttctggccagcggcttttgatttcttttgtactttcaatgccatccatttcgggcatgcgaatatccatcaatacgaggtcaggcgcttttttctctatttgtacaagtgcttcacggccattgttggcagtgcctacgacagtaaaatcatcttcgttgccaagaagcagttcgagactctggcaaacgagcgcatcgtcatcaacaataagaatgttcatctcgcatctttcctttcttggattggcaggacacaaacaatcgaatagcccgatgagcgatttacagacaagctcccgccagcggcgcgtgcacggatttttaaatttctcaagccactgccgtctgtggactgagcagaacaagtgccgttatcttggatgctgaggcggacaatcgtctctgtgacatctagatgaacagtgacttttgtcgcatcgctatgcctggcgacatttgttaatgcttcttttaaacaagggatgagcaaactccaaagatagacagggacgctgtccatattgcctgacttttggtaagaaacaggacagtatgtaaagttttcggtaatcgattcaatcgtttgctcgccgattaaggcgacgggagtcatgtcatggacggtgtcccgtaaccgttttgtgctccgtgttaaccgtttttttacttgtgcaaacattttttctgcctgttcgccatgttgacactgttcataggcttggagggcgagtagcgcgccagtgagatcgtggccgaggtggtcgtggagatcccgggcaatgcgatttctttctgttagttccgccatttgtgccgtttcgctattggcctgaagcaaatcgatttttaaccgttccagctcataacgtgcttttcgttcttggtcgatttcacgccaaaaagaagtccgttgttgttgccaatggcggagtacagtcccaaacaaggcagcgcttaaaagaaagacaacgaaatgaacagtggcagctccactggcgaaaacgataaaagggataggcacacaataatagggccttcctcgccataaactctccactaaaggcaaggcaagaccatataagctccctacccaaaatggtgaaaagagcaggcaaaaacataaatcaatgagcacagtccagctgggcaatcgtattcgccaacggagcgctgccatgattgccagcaacataaccaagacaaacgggaccttcgttccgttttcgataaaccacaaaactgtaagaaaaaacaagccgccgattcgccataatcccatataaaagcttggtcttgccagttttgccatcggctagccctcctaccatttttctagctttaactataacgacatctgactcctagctcaagtgccaggagtcgataaaaagctcggcagaacgaccctaagcgattttacggatactgccaatgatcagaaaacagacagaatagagcaagagcatcccatgaatgagccatatgtctgctgtctgaccgccgagggcgatccacttcatacctgacgataaccaataagtcggaaaaatgacagcgagtcgttcaaagccggccggcatcatctcgatgggcataataagtccgccaaggagggcgattaacacaacaatggacataaacacaagaaaagacgtctctttgttgcgaaacagggaaatccaggcaagcgcaaaagcaagggatgtcaaactaaaagtaacgaacaaacagaacaccgcaaagggcgagtataactcttggccatacaaaacgcctccgccaactgctagcgcacattggaaaaggagaattaccatgtaggcaagcaagttttgccaaagatagtgtagatggctgattggtgcaacagctaaacgtttgacaacgcctttgagccggtcttccaacatcatggaagacaaacgaatgctgacaaacaagatgagcacgccaaaataatggtagccaaaaggaagaaaaggccatatttcactggcagggagaaaaatcgctgcaacaggaaagagagttaaaaatagaaggttggtcttgttgcgaaaacttcgtttaagggcaaattgaaaaattgtcatcccattcgcctccgcccaagcgcaagcatgacaaagaaggcaacaatgattgctccgagtaaaatgcttacattaagccatacttctgcaacgtttcctgcttgatattcaaaaatcgcagcgctagcgagcgtcaatggatttccatatgaacccataaactcaaaaaaagcattttctggcatggggaaaaataaaccagcaagcacaatcgcaccgatgccatacacttcacttagtcgttctgcgactttaaactgtttgacggcaaacgtgaacatgaggcagacgatgcttgataacagggccattaatgcgatcacaaacacggcccagccaatgttcccccattcaacattgaagacccaaaaagaataaaacaccaaaatgccccctagaaaaatggaaaatagcgtcccgaggacactgatcgagaatgcatacagcgtttggttaaaaggcagtgactgaatgcgaaaacggcgctccgtgaaaaagtcttcatgtatataggacatgacgattgagcctccaaacagttgaaaggcaagaaccataaaagtggttgattcttgaatgtaaggcataccagcttctgttttagaatcacctaaaataagcgcaaaaaatgtaatcaacacaatcggaattccgagcagcaacaataacacaatccaattgcggatcagccgcaatacggtaaaccgcagcgtaggaagaacattggtcattcttttgcctccccatcacgcagctgcttgccagtaagggtgagaaaaacgtcttctaaatttggtttttcagcatggatgccgagcaagccgccatgttccttgataattgaaacgacgcggtcaagattgcctgcgccggcttttgaaataacggttatgttgctgccatcaacaacaacttgtttcaccccatccaattgttccaaacgagaaataggtacgagcgctggctcggtcacatcgattttgattttttcttcatgttgaatcgttttaattagctcatcaacggtgccatctgtgatgatttgcccttggtcgacaattacgacacgagaagcaatcgcttgcacttcttccatataatgagtcgtgtacaaaatcgtcgtgccgcgttttcgtaattcttgtacagcttctagaatgtggttgcgcgattgagggtcgataccgactgttggttcatccatgattaacagctttggctggtgggtgagtgcacaagcaatatttaagcggcgtttcatcccacctgaaaatttgtttggagcggagcgtgcatttgtggaaaggccaacaaattcgagcgcctcagcaacgcgtttttttcgctcctctccgcgcaggccataaacgccagcaaaaaattctaagttttcttttgcagtcaattcttcaaagacagttaattcttgagtgacgagccccattttcgatttgttttttttcgtaaatgggtttttcgttgatccgaataactcgattgttcctcgatcaaaaggaatcatgcctgttagtgtatgaatgagtgtcgtcttcccagccccgttaggaccaagcaacccgacaatttcaccttcatgaatgtccaagtcgacatgatctaaggcaagatgggagccatatcgtttgaccactccttgcaaagaggcaatcaccatgttcatcaccttttcgtgtgtaggatacatgtagtatcgcgtaaatctgaaccggcgagtagttccatttgtcactaaatgaaaaaacaagggccaatgctttcgagttttactcataccagacaaaccaaggataaggaaatcggacacaaaatgacaaatgtaactatgaggcggcgcctaattacactcgtatagacagagaggcggcaaatacatactcgatggtcatcgttacagcagctaagtccgcatgtgttcatttatggatgattggtttatgtcgtcgccaaaaccgtttaatgccgctgcaattgatcgacatgtaggtaatggggtgtttgtttccctaagacgagcacgatctgttaattggacggaatgaaaccacgcttttctatttcctgttttaaaatggcaataaacgttgcatcgagattgtgttcgactgctttgttccatgcttcgtaaaggatatcgtcttgtaaatcgcttaacatgcattctcactcctaatttaaagggaatagattctttttccctatgataaatcagtctaaacatacaatggctgacgattctatcgtagacgctaaggtaagcaatatatgtctaacggtttgggcaagtatggtatgattgagagagattaaaaatcaaaaaagtggaggaatcaaggtggatcttatcctcgcggaaaagccatcagtggccaaaaacattgctgatgcgttagagattaaagcgaaaaaagatgggtactatgaaggggatgcttacctaattacgtgggcgtttggccatcttttagaactgtatgacgcgaaagattatgatcccaaatttgccagatggcaggagagttactttccgttcattccaactcagtttaaatataaagtgaaatcaacgtacaacaaaccagatacaggggcgaaaaaacaacttgccattatttcccggcttgctcgacgccatgacgttcgtcgcattatttcagcatgtgactatgaccgggaaggccagttgattggcgacagcatcatttctaatcttcgtgccgataagcctgtgttccggatgctcttaaatgaatggacgaaacaagaagtgctccgcggcttaaaacatgcgcgccctaattctgagttaataacattgcgtgatgccggggttagccgccaatgggccgactgggcaattgggatcaatttaacgtctgtagcgacactgaagtaccaacctgggcggggaagcgtcttaaatatcggccgtgtcttgctgccgacgttaaagattatttatgaccgcgataaggaaattgcagcatttacgcctgaacgttattataagttggttgcgttgtttcaaacggccggcggcgctacctatgaaggcgtttatacatgcaagaagcagactgccttttcggaaaaacaagggctagagcaagtggcttcgctgctgcctggaaaacttgcacgcgctgtgcatgttgagagaaacgagaaaaaagaatacccgcccgttttgtttaatttgtcgcagctgcaaggccatattacaaataaatacaagggatggacggcagacaaagttttaaaaatcgcccagtcgttatatgagaaaaagttgattacgtatccacgtacgtctagcacggcgctggaggagagtttagtcaagaaaacggcggcagtccttaaggccattagcaaaggcttgccgtatgaaaaggacattcgttttacaacgagcaaacggatttttaacaatgccaaagtggaaagtcacagcgcaatcatcccgacgtacatgttgccaaaacgcttgaatacggaggaagcaattgtctataatgcggtaaaaaaccggtttctaatgcaatttatgccgccagcagaatttctagaaacgaccattcatacaaagctagaagaaggcgtagcagaagggttttttgtttcaaagggaagggaaaagcgagctgatggctggcaccaagtagagcaagtaaacgggaaggaaacgtttttgcccaatgtggaagaaggggaacgtctcaaagcgctttctggaaaaacgagcgaccatatgacgacaccgcctaaaccacatactgaaaaaacgttgttgcatattatggaaacatgtgggcggaagctcgacaaagacgatgccgagcagcttatgaaagggtatgcgattggcacagctgcaacaagagcagataccattaaaaagctaaaagatattgggtatattcatgcatctggaaaagcgctccattgtacggaaacgggcgccaaactagtggaacaatttccggttcaaagattgtttgatttagcttttactgggagattggagaagcagttattcgatattgagaaaggacgcttggacaaacagtcatttttgcaaagcatttttgcctttattgaaacagctgtgcaagaaatcaaagccgatgagacaggcaagatcgaatcaatggcgaaaacgaaaaaacgccaagtaacggaaacgcttggcaaatgcccactatgcgaaaagcctgtgattgaaacaaacaaagcgtttggctgcagtggctggaaaagcggctgcccctttgtcatttggaaaaatgataagtatttggctcgcttcaaaaagaagccaacgaaaacgatggttaaatcattgctaaaacatggcttcgtcaacgtaaaagggctaaaatcaaaaaacggcaaaacgttttccgctacgttgcgttatcagcagcaaggcaactattttagttgggttcttgaatttcctaagcgaggtgatggacaatgatccaccaatttttattggatgccacctggaacggcggccgtaatagcactggtactatccaaacaggcaacttatctcattccatatcgattccgaaagaaatgggcggacctgggattggcacgaatccagacgaaatgctgctcggtgctgccgctacttgttttttgatcacgtatgctgccatgcttgagcgggctcaaatcgaggtggagtcattgacacttcatgcagaggccgatgtggatgtgacgaataacatctttgaattccgagcaatccgccactttccgacagtggtattaaaagagcaaacccagctggagaaggcggaacgcttagcgtttaaagcagaatcttcttgcatgattacaaaagcagtcgcaggcaatgtcgccgtgtctgttacaccgaatgtgaaagcagtggatagggatgaataagcgtctggcgtctgtcttttttgtgattgccttcctttcgctctcgctgcttgctggctgtcaaggggaagacgaacattctgagacgaatgacaagccagaaggctatgtggagcctattccagtaaagctcgtcgaagaagatccgattacagcttcataaaaaacgcacacctacaaatggaggtgtgcgttttacgttcctgctgctttgtgcctgtttagtggaagttgtataagctcgtacccttcctctgtatacgtgtggtagtaccccattacttcttctacgtaatcttcgcttttgttataagagaaaagcgcctcttcataattgccttcacgtgcgccgtggtcagccaaataccgagcagctgagtaggcggagtcggctaggtcaaaaggatcggctttgccgctacctgacgcgtcagtgccatatccgttatgggcttcaattaaatcggtatccgtaatgtcaacatcttcagcgacattgccgatgtcgtcagtgcctgggtaagaccagccgacccatgtacggggcataaattgaaaatgcccaagggcgccaacagggctttcgagcggatccattgttgaaaagatcgtttcaacgcgatgaacggaagcaagcagttcccaaggcacgccatactcttcgcctgcctctttgtatataggcacataatcttcaggaatttggttttcggcaataatggttttgtaaacattttggcgaaagcggtcattttgttcaaacaacaacacgattgcgaccaagcaaacaagaaaaaacaacgaaatacctaaaaaccattttcgcatgaatcgagcctctttctgcacaaattaccctcttatcgtaacatgacaattgaaaaaagaacatagaaagaatcgtttcaatgttgacgattttgggaatggcaaggaggggcaacaccggttgctgtaaggctagaattctattggtggaaaataaatggagacagacgttaagttcgctttcgccccgcaaaaacgaattcaccatatactaagcgaattagatgcgaaaaggaagcaaaggggtgggcaaatggcggtaaatgaatatgtaaaagtatggaatgctcgaaagtggctgaaagaggcggaaccgtttttaaaggtgtggcatgcctatttgggctatagcttaaatttattttcttattttaagagtggcgctacagtcgtcgacgtagcggataaacacggcctcaaacccgaattgttgtcgcgctgggtcgaagtgggcgttgcggtcggccacttgcgtgaaagcaaaggcggcaaaatcaaaaccaaaccaaagatgggcaaatatttaacaaaagaaagcaagcattcagtcggtatcttgctcgaggagctgtttgaattgcatatgcctacccttttaagctaccgagaacaacttcccaacaaagagcaagatcctcctcctgagatggccgatatggtggcgggcacctctagtctccttgaagcattggctgtgccaaaaattgctgccgtcataaaaaaacgcaaagccgaatctgtgctcgatgtcggctgcggctacggtggctatgtaaaacggttggcgcacacatttcccggtacacaatttgacgggattgaagtcgaccacgaagtgtgcgtttccgctagaaaaaacaatgtaaacgaaaatgctaccattatcgaaggtgatttttttcactttcaaggcaagcgtccttatgacgttttaatgttcaacaatatcctctattacttttcgactgaaacacgcgttgagatgtttaaacgggcagcggcgcagctagcaaccgacggagtgctcattgtcattagccctataaccgatgggaagcacggcaagcgattcgctagtgcttttaacagtttcatgagcgcccataaaaaaatgcaccctcttccttcaaagaaagagttggtcaaagcaagcaaacaggctcattttcgtttgctgtctgctaagacgattgtcaaagaagggggctggcactttcttttatttgagcaacgcggtaagcactagaggaatgcagtttaagcgctaggaaagacgattgacaacttgttggcttttaaccacacgctgccactggtatgatgaagaggggggagggagcaatagatgattcgaatagatacgtatacgcgccatcaagccgcatttacgaatgtctcgctatttcatgttgatgtattgccagactggatcgttgttcagcttgcttttgaactggatccgccccttgctgatatggaggctccaggggcacagctcattattgcaaaagacggctctttaatagaagcaacatttcaagaagagcgctgtgatgaaccgaccattcaactagaagaagaggaggcgaaacagctacaatcaatcgcggcaaaaaattgggaactcatacctaatccgaaagacggaaacgctttttgacgaaataggcagaatgctcgataaaaacactggattttcgcgcgcaaacgcgctaaaatcgaagtgaccgcttccattgtcgacgatccaaaaaatgtggcataattcgtcaattattatgcattttttttgagatacaggctggaaaatggtaaaataggtttgtaagcgcttgaaaaagaattcgcctttggcgaatgaaacgttttaggaggtttatatcacatgtccagcaaggaacacagcccggaaaagccttggcgaggattttatggtcctaaccttggagccgtgattgagctgtacgatcaatatgtggaagacccgaactccgtagatgaacaaacgcgtgcccactttgagaaatggggtccgccagctttagaagagaacgtcagctcgtctaatgcaaaggaaacaatcggggcggacatgataagcgcagtagtaggagcggtgaggctggctgattatatccgtgccaaaggtcatttggtgtctgacatacagccgatttggaaaaccgacaaaaacagcaatttgctagactatgaccgctttaacgtaacggaagaagaattgaaaaaagtacctgtcaagctgatttgcaaggatgctccgccgcatttaaaaaatgggctcgaagcgatcgaacatttgaaaaaagtgtatacgcagacgatggcatttgaatttggacacgttcaagatgaagaggaacgcaattggctccgcaagcaagtggagtctgaagcgtatgccgatgagttgccaaataaggagaaaaaagcgctgcttgaacgactaacgtctgtagaaggctttgagaagtttatccaccgcacctttgttgggcaaaaacgtttttcaattgaaggacttgatacgcttgtgccgatgcttgataaagcgattagggaagtcagaaaagaaaagactgaccacgttatgatcggcatggcacatagaggacgtctcaatgttttagcccatacacttgggaaaccatataaagcgatcttttcggaattcctgcaagcgcctaacaaattaaatgccccgtcagaaggccttggagaaacctatacaggctggactggcgatgtaaaataccatttaggggccgaccggcaaattagcgacgacaaaagcgcgcaaacgattgtgtcccttgctaacaacccaagccatttggagtttgtttcgccgattgttgaaggatatgcaagggctgcccaagaggatcgcagcagcaaaggcgcacctaaacaagacacgacaagggcttattcgatccttatccacggtgatgccgcatttccagggcaaggcgtcgtgacggaaacacttaacttaagccgtttgaacggctatcatgtcggcggttcgctccatattatcgccaacaacaacatcggttatacgactgaaatgcatgattcgcgttcaactacatacgcaagcgatccggctaaaggctttgaaattccaattgtgcatgtgaatgcagatgatgcggaagcctgcgtgagggcgattaaatttgcagtcgagtaccgtcgtaaattccaaaaagactttttaatcgacttaattggctaccgccggtttggccataatgaaggcgatgagccagcggtgacacagcctgatctctacgcgcaaatccgcaaacatccaaccgtgcgcgccatttacgctaaacagcttgaagctgaacaagtgattacagctaaagaagcacagaagctagataccgatatgtacaactacttgctggaagaatacaacaaagtcaacagcgataaatcagagaaaaagtatgagctgagccctcctgactttattgtggacggcttgccaaaagtgaaaaccgctgtcgaaaaagaaaagcttgttgccatgaatgagcagttgcttgactggccgagctcctttaaaccaaaccaaaagcttgaaaaaatcttaaagcgccgtgccaatgcatttgacggcgaaggcaatgtcgattggggattggctgaaatccttgcgtttgcttcgattctccatgatggcacaccggtccgtttgagtggccaagatagtgagcgtggcacgtttgcgcaccgtcactttgtcttgcatgaccgggaaaccaatgaaacgcatgtaccgctgcaaacgattaaagatgccaacgcatcctttgccgtttacaacagccctcttacggagcaggcatgcgtgggctttgaatacggatacaatgtcttttcaaaagagacgcttgtgttatgggaagctcaatttggcgactttgtcaacggcgcccaagtaatgtttgaccagtgggtgtcggctgggcgagcaaaatgggggcaaaagtcaggtcttgttgtcttgttgcctcatggctatgaaggggctggccctgagcattcaagtgggcgtgtcgagcgcttcttgagctcggcagcagagaataactggacagttgccaactgcacatcagccgcacaatatttccatattttgcggcgccaggcgaagattttgcaaaagaatacagtgcgcccacttattatcatgacgccaaaaagcttgctccgtaaccaagtggttgcttcgccaacgtctgcttttacagaaggcgagtttcagccgattttggaagagccaacgcttggtcatgatccgaatgcggttaaacggattatattgtgcagtggaaaactagcaattgaattgcaagattatgtgaacaaaaacgatgaggactggagttgggttcacattatccgggtagaagagctgtacccgtttccgcgccgcgcgattcgcgaacgattaaaagagtttcctaacttagaagaagtcaaatgggtacaagaagagcctaaaaacatgggtgcttggacttttatggagccgcgcattcgcgaaatcttgccttcaggggttccgttgagctatattggccgcacctaccggtcaagcccagctgaaggcgtatccaatgcccataaagtagaacaaaaacgcatcgtaacggagtcattgactcgcaaaaactaaggaggctttttgacgtgactgaaatcaaagtacctgagcttggagaatcgattacagagggcaccatttcccagtggttgaaagaagtaggcgattatgtcgagcaaggggagtttattgctgaacttgaaacagacaaagtcaatgctgaaattcccgtggacacggctggcgtgattaaagaattcaaacgggaaccaggcgataccgtagaaattggcgaagtcatcgcgattatcgatgaaagcggctctgccggcggctcctctgcaacaagcgaaagcacaaaggaagaagccacggcaaaagaggaagcaccgcaggaagagaagcaagctgagcaaacgcaacagccagaaaaagaggaagctgtcagcaacaaccgcccgcttgcctcgccagcagcacggaaattggcgcgtgaaaaaggcatttcccttgatgcgattacgccaacggatccaacaggaaaaattcgccgccaagatatcgaagcccatcaagcaaaaccaaaacagacagaagcgccgaaagcacagccgtcttctgcaccagtaagcgaaggggaagcaggcaaacctgttgaacggcaaaaaatgtcacggcgccggcaaacgattgcaaagcgacttgttgatgttcaacatgaaacagcgatgttgacgacttttaacgaagtcgatatgagcgcagttatgaatttgcgtagccgccgcaaagatgcattttctgaaaaacatggtgtgaagttaggatttatgtctttctttacaaaagccgttgttggcgctttaaaagagtttccgcttctaaatgcggaaattcaaggcgatgagcttctcatcaagaagttttatgacattggcattgctgtttcgacagatagcggtctcgttgtccctgtattgcgggatgccgatcgcctcagctttgctggcattgagaaaggcattggcgaacttggcaaaaaagcacgggacaataaattgcaactggcagatatgcaaggtggtacatttacgattacgaacggcggggtgtttggctccctctggtcaacgccaattttgaacgcgccgcaagtaggcattctcggtatgcataaaattcaaatgcgcccagtagcgattgacaacgaacgtttcgaaaatcggccaatgatgtatttggcgctctcttatgaccaccgcattgtcgatggcaaagaagctgttagcttcctcgtgaaaattaaacagctgattgaagatcctgaacaattgttgctggaaggctaagaagataagacagcacagggctggcgaaccagccctgtttgctgtacaataaaggaacgcagcacaaggagggacgatcagtagtgattcaccaaacgtggacgaatgcaccgacgatacgcatggtgaaatgtgtacataccgatgcgaaaaaatatattgtcaaccgtgctttgacagcagggaaagaatatccgcttaaaaatgaaaccgacgagttttattttgtcattgacaatactggaaaagtgggcggctattataaagagtattttcaaggctagtaggcgcttattgtcgcaataggaaccccccgtgctaaggcaacggggggttcgatgtttattttacatgttttaagtaatcttcatacgagtcttcgtctatgatgccatccgctgtcaactcaatgacgcgatttgaaatcgtgcgaatgaattgttggtcatgggaactgaacaagagcgaccctttaaaattaatcaacccgttgttgagcgctgtaatcgactctaagtccagatggtttgtcggttcatccaacagcagcacattcgcgccagagagcatcatttttgacagcatgcaacggactttttcgccacctgataaaacgtttgcttgtttaagcacctcttcgccagagaagagcattctgccaagaaaaccacgcaagaacgtatcactgtcatcttcaggagagtattgacgcaaccaatcgacaagatttagctcgtttccttcaaaaaaggcagagttgtctttcggaaaatacgattggcttgtcgtaattccccatttaaatgtgccctcgtcaggctcgatttcacccattaagattttaaatagcgtcgttttggcgacatcgtttgaaccaacaagagcgattttatcgtctttgttcatgcggaacgacacattgttcaacactttttcaccatcaacggtttttgacaacccttcaaccaaaagcaaatcatttccaatttcacgtgctggcgaaaagtggatgtatgggtatttgcgcgaggaaggtttaatgtcgtcaagggtgattttttctaattgctttttacgcgaagtcgcctgtttggatttggaggcattggcgctaaagcgagcgataaagttctcaagctctttgattttttcttctttctttttgttttggtcttgtgccatttttaaggccaattggctcgattcataccaaaaatcatagtttccaacgtacagctcaattttcccatagtccaaatcggcaatatgcgtgcagacattatttaagaaatggcggtcatgggaaacgacaatgaccgtattctcaaaattaataagaaaatcttccaaccattgaatcgcttttaaatcgaggccgtttgtcggctcgtccagtaaaagcacatccggtttgccaaatagcgcttgtgccagaagcactttgactttgtctgattcagcaagctcagacaacgttttatgatgttggtcttcgccaatgccgagcccttttaataggacggctgcatctgactcagcttcccaaccgtttaattctgcaaattcgccttctagctcagctgctttcatgccatcttcatctgaaaactcagctttcatataaatggcgtctttttctttcatcacttcatagaggcgtgcatgtcccataatgacggtttgcaacacttcttcatgttcatattcgaaatggttttgcttaagaacagctaggcgcgaaccttctttcatcgaaacatgccctgtctgagattcgatttcccctgaaaggattttcaaaaaggtcgatttgccagctccattggcgccgattaaaccataacagttgcctggcgtaaatttaatattaacgtcttcaaatagtttgcgtccgccatattgcaaaccaacgttcgctacagtaatcataaaaaaagcctcctacacattgagcataaaaggatgccgctgtcggatccctatctctttcatctactactactacgtagtttaccgtttaaaccgttgcatgtaaacgaaaagcagcgattttcacgaaaatcatagaaatccctattttttacgatcactggaaatgtcaaaaaggaaacaaccagcaaacccgaaagggcttgctggttggattttaacgcgtattcatttcgctcggtttagcgccccggcgttggttgcggtcaaggcgattaatcgcatccatttcttcatcggacagttcaaaatcgaacacatcaaagttttcttcaatccgcgatggcgtgactgatttaggaatcacaattgtattattttgcaagtgccagcggaggacgacttgtgccgtagttttgttatgtgctttggcaattttttcaacgacttcgtcggttagtacctcgccgccttggtcaaggggactccatgcttccacataaatattgtgtttggcacaaaagtcttttagttcattttgggcaaagtatggatggcattccacttggtttaatacaggcgttatatcgcactcgtcaaggagtcgctccaagtggtcaatgtcgaagttacaaacgccgattgcccggacgcggccatcgttgtacaatttctcaagcgctttgtatgtctcaatgtactggtcataatgaggcgtcggccaatgaatcaaatagaggtcgatgtagtcaaggccaaggcgctccaggctcgcatcaaacgctttcagtgtttgctcgtacccttggtctgcattccacactttcgttgtaataaatagcttttctcgatcaatgcccgattctttaatggctttcccaacgccggcttcgtttttgtaaatcatcgctgtgtcaatcgacgtatatcccacttcgagcgctttagcaacagcgggcgttgcttcttcatctggcacttgccaaacaccaaaaccaagctgcggcatgtttacaccgttgtttaatgtcaccattttcatgttcagacactcctttatcggaattggatcaactctatgatagtatacgacatttaccgatacttgtccttttttgtgcttgcttgtgttaagacaactgaatgttgtttttatgttaaaggatttctcttaagagggagtcgactttattattagcctcgtactatactaaatagaacagatcagtctatgtaaggaagtgttcaaatgggacaggcgttattggatcaagcggagcacgtgttgcggtcattgtatggctatacggcttttcggcctggccaacaaaaaattattgagtcaattttaaataaggaagatgctcttgtcgtcatgccaactggcggcggcaagtctctatgctatcaaattccggctgccgtgcttgaaggcgttacgctcgtcatttctcctttaattgcgttaatgaaagaccaagtagacgctgtcaatgaaatcggcatacctgctacttacattaatagttcattgacgaaagcagaagaacgaaagcgtttgaaagatgtcgctgacggaaacatttcgttgttgtatgttgcacctgaacgcctttatgagccatcgtttcaagcagcgttggcaaagcaaccccttgccttaatcgccattgatgaagcccattgcatgtcacagtgggggcatgactttcggccaagctatttgacgatggccgactggattgattcactaccagaaaaagtgcaagttgtagcgcttacggcgacggcgacaccggatgtggcgcgcgacatatgcaggcgccttcacattgatgaaaacaaccaacatcttactgggtttaaacgaaccaatttgacattgcgtgtgttgaaaggacagaaaaaaaccgcctttttacagcaatacgttgaagcaaaccaaggggttccaggtattatttatgcctcaacgcggaaagaagcagaagcgatttacagagccatcgatggaaaaacaaacgctgttctctaccatggcggccttccagagaaggaacggaccgaaagccaggaagcgtttgtctatgaccgggctgatgtcatggttgccacaaatgcgtttggcatgggcgtcaataaagccaatgttcgctatgtgcttcatgccaatatgccagggacgctcgaagcttattatcaagaagccgggcgtgccggtcgagatggcgagccaagcgagtgcatgttgctataccaagcacaagacgttcaaacgcaacgtttttttattgaacagtccgacgcctctgaagagaaacggaaacatgactttgaaaaactgcaatggatgagccgttatgcccataccaaccaatgtttagagcaatttattttaagctattttggcgaggatgcaggtgaaccgtgtgggaaatgcagcaattgcaaacgggaaggggaacagcaagatgtcacacgcgatgcgcaaaaagtgctttcttgcgttgttcgtgtcaaagagcgatttggaaaaacagtgattgcccaagtgttgacaggctcaaaaaacaagaaaattgaacagctcggtttagataaattgtcgacatacgggctgatgaaagacagatccgcaaaagaagtccaagcatttatcgactttttactagcagaacaatacattgggttaacgcctgcttcgtatccgaccattcaattgctgccaaaaggcgcggcggttctaaaaggcgaaggccaagtttatcagtacaaagaaacggttgaacgaacagtaagtgacgaagaccccatctttgccgcactccgtgctgagcggaaagcattggctgatgagcaaggaattcctccttatttgatcttctccgataaaacattaagagaaatggccgctgtcgcccctcagtcattggaaacattggctacgatttctggcgtgggcgaacacaagctcagcaaatacggagaagcttttttaaaaacccttacccaatttgagaagcaagaaaacgcgggtttgcctttggataaggcacagtctaccgggcacaaacgtgtaagtcgtgaggaagtcatcaagcactttgaagctggacaagcaccagctcaaatcgcggcaacactcggttttagcgaacaaacgattgtgaaacatttaattgctgctgagaagaacaacgagacgacaggtgtcgccaatctcgttgagaaagagaaggcggccttgatccgccaagcaatcaaagaagtcggctcttcttatttaaagccaattaaggaacatgccggtgatggggtatcttatacagagatacgtattgtcattgaattagggtgacggatttaagaatgagcggttgcggcttacaggtgtggtatggtacaacaaaatgagaacgctaaaggggatgatcgcatgattgaagagctaacaacagaagcagaatggcaaacatttttacagggaagtggggacaccctatcgctgctatttaaacatagtacgcaatgccctgtatcggcagaagcatttgaagagtacaagcaatttgcgaatgaaaacaattcctaccggtacgggttcgtaaaagtgatcgaatcccggccggtttcaaacaaaattgccgaagacttagataccgttcataaatctccacaagtgtttgttttaaaaaacaaatccgtgcgatggacagaatcgcactggaatattaaaaagcaaacaattgccgaacatgtcgaaaacgagcgctagcgctcgtttctgctttttgccgccttgtcttgtttaaggatgcaaccatatgtgaataaaacaaacccaatcacgagcagtgaacagatccgctgaatgacagaaaaccaatccatttttccgcctccttgcatgtaggttcccgctcacaggcgaatttattctgaaagaaaaaacaacggcactcaagttgatagaaaacacttggttacagtttgaaggaccgagtcctgtagggttcggtccttgcagttaaccatgccaaataacgtggcctgattgtgtttctttattgacggagacatggaaatggtgttttttgtaaaaatggatgagtctatccaaatgatcccaatcacgcttggcaagcttgccttcaatcaaacaattgtgttgccaggccgcatcttttaagtatgccatgcaaatggaaccaaaaccacggttcgggtcacctttgatatcgtcaataaagagacgatgggcgttaacgtattctgcttggagggcaaaatcccaatggccatcatagggcgaatggcaatcgttaaccatgagctggagcgtgcgcccatgttcttttttggacacaatcacccattcttcgttgggcgtttgttcaacgccaatcacttctttctgttcttctttcgcaatttctcgaacttgttgctgcatacggatgagctgaatgtctgtctgatcagcaccccgtatatcgattgttgtcacagaatcactcctcttgaatttgacaccgtgttctagtataaaggaagaagtgtataggtgcaaaaaaatgtggctaggagggcgggggaatgaaagaaatggcgatcgcgccaataagcataaagtattcaaaacatttatggaaatgggtcttttctcaagacgacccagaatggaaacaatgggatgctccttattttgagcatcattcgctcccttatgatgcgttccgtgaaaaagcagaaaactgggtcaatcgccaagacgtgcaaggaatttttgtagaagacgaattaattgggacggtgtcgtattattgggaatgcgaaaaaacccgctggctcgagctaggcattgtcatctttaatcctgcatattggaatggcggttatggcactgaggcgctgcggcggtggtcagctattgtgtttcacatgcatccgcaaattgaacgtgtaggttttacaacgtggtcaggcaataagcgaatgatcgcagttggcgaaaaattaggttttagccgtgaagcgcgtattcgcaaagttcgctattaccaaggagtctattatgactcaattcgttacgggctaacacgcgaagaatggaatacgcgccaaaaccaacggtaaaggcgtctgttaagaaataaaagccaactcgtccgccaatttaacgcgaatagcaagacgtgaaagttccttgtcaacttcgccccgattcaaagaaagaacagcgtcattgatagaatagtggcggagttcgggaatgtcgcagataatggcagaaagcttttttgaaagctgagtagacgcttgtccagctagtagttttttctgtgcccgttttaatggcggctggattgtgtcgatttgttgatatagcgattcaatcgacccgtacgcagcgatgagaggcagggcggttttttcgcctattccgggacagcctggaatattatcacttgtatcgccgacgagcgcctttacatccacccactgggtaggggagaggccgtaactggctttgaacgacgcttcatcgaataacacttctgtttgctttttagcaacaatttgagtggtgcgggaactcagcaattgaaacaaatctttatcgttgctgtaaatatagcaaggaccgctcgtttcagcttcccatttggccgaaatagcaccgataatgtcatctgcctcatatggcggcacttttaattgctcaaccccgatgtaggaaagtgttttcacacattgttgatattgttggattaatggttccggaagctcatttcgcgtcaatttgtagtcgggaaacgtttttcttcgcaaggcttcctcccgaggcacatcccaagtgacgatgcaatgggaaatcgaataatcggtaactagcttaaatagtttttggataaacacacgaaggccgttcacatataagccttcgtcgtttcgttctaacttttcaatcgggcggttatagctcgtcgcaaaatacccgcggctcaataagttaaagccgtcgactaatagcagagcctgttcattggccaaaacagttcctcctttttaatggaaaaagccgcctccctgaaattgggaggcgattcacgcgaacggatacgtccagaaacgttcgttgcaaagccgttccttcgcttcttcgacgccgtcataataggctttttctaagcttggcagcgtccatgctaactgggaagcatgggcgcgtaacgtatcaagcttgcggatggcgtacgctgaaacatcatggacgatatccgctgggccaatctctttttcgtggttgtttgagaacgcgactgcgtaaaaagtagggcgctcgctctttggtaactctgctagtgcggacgcgacggcaaggccagtagcgtcatggtcagggtgaacagcatatcctgggtaaaacgagataacgagggaaggcttaagttcagcaactaggtcaagcaccatctgtttcaagcgtcctggttgttcaaattcaagcgttttgtcgcgatagcccatcatccgcaaatcggtgatgcccatcacggcggcagcctgctgcaattctttgcggcgaatgtctgccaatgattcccgtgtcgcaaagggagggttccctaagttgcgtcccatttgcccaagcgtcaggcaggcgtatgtcacgggcgttcctgcatcaatataagcagatatcgttcctgaaacaccgaatgcttcatcatctggatgaggaaagatgacaaggacatggctttgttttttcatgctcgttcaactcccagcaatcaattaatcgtcaaaaggcgtgcgtgaaagttcaaaggcgacgccaagttttccgtcagggccatggccagccattagtagccgcccctttttgtctagctcaaaatgggttaatccttcgccatatacccagccgatgttcaattttaacccaactctgtatggtccgttgccagcgacaacgccatgttcgtacgaaataagggcattgcggatgtaggcgctggctgaaaaaaacgattcatcaaaatgggaagcgtaagccccatttgtcgtttctaaatgcaagtaaacgtcttcgttcagaaaagaatcaagcaacgattgaaggcgttctttctcaatcggttccataataaacctccagcaagtagcatctatgtatccacattataagtgaacgatccaaggctggcaacggcaacgacttgacaggcagggcagtcatttttgtagcaaagggacgagcgatggtatactgaatgtaagagaagacaacgtcgaggtcattttttgcgaaagggtgtgcggctattgaccataattacattgactttgcctcgtataacgagggaatgggttgaacccaaccaagctgttgctatgtacaaagaatgggcagctactaacagcgaaaaaggcacattggcccaatggtaaacaaccatccgccagaagaagaacgatttgaagaagagccgccacttgaggcatttatggaagaagagccgcccccaaaaacgagacctctacgaaaagcggtcgttatcattgtagcagctgttgtcgcgttggctatgcttgtgcaaggaagtgcctttttgtttcagcacttcagtttagacgcactccgctttacgagtgaaagccaacaattggaaaaagaaggcgattttgaaccatttaaagaagcggtcgttgctgtgcaaacagacagaggccacgggacaggcttcatcatttcagaaagcggcgacgtgctcaccaatgaacacgtgattcgtggagcttcgtccatttatgtccatttgccagatggagagcgttacgaggcgactgagacgaaaacagacgaaacgaatgacttggccatgttggcgcttgaagggcagccagacaatttaccgacattaacgcttgccgatacggcagcgaaacctggaaacacggtatacgtaattggccatccgatgacgcattcctacatcacaaacaaaggggaagtaaaagaaagccatgatgcttaccaagttttagcaattaccaatgctgtcttccctggacatagcggttcgccggtgttgtcagaagaaggagaggtcataggagtggtctatgcccgcagtagtggggaaaacggaaatggcgaagggcttgctgtgccgctccgccaaatccatgcatttgtcaaggatgattcaggcatttaatcgtcgactttaacgcctgctcctttgttttttgcaattttgcgtgctctttgcaacgcttcttcttttgtatttgccacataggaagcgcgctttgctccttccgcataaacagcccatccatcttcgcgcttgacaacatgttcaggcttgtcggctgtttctggtgaagacgaggaagaatcatgtttagacggagttactttgccatgtttcaaaaaatgggcgatttcgttatcgtcagcgttttctttccattttttcgcctgttcagtggcaattggaatggcgcggctttcagagtagccgtctttaaccatcgagttggccatttcaatcgcttttttgcggatggccttatcgaaattttttaaagatgaggggtagtcatccattgtccatggcatagccaacacctccttttccctttgtatttccgttttgctgacatttaaacatggtttgttttcatgcacaaagggtatacaggcagcaacgaagagaaaggaagtgtagacaaatgaatgatcaaaaacaaacgaataaccaagaagataaaggcgaggacattgtcaaacgccaatttaacgagtcgttgcaccaaggaacatccgaggacgacaaacaaaaaagaaaacagcaaaagaaaaaataagcatgtggcagatccacatgcttaaggttgtcgacaaagtcgataactgttctcagactgatagaaaacgtttgtcagacgaggagtgcagccgagggaagatgcgaatagaacgtgggttcatgagcatatgagtgaggcaaacgacgacgtatgcgaacgtttttctacagtctgaagcatgtggcagatccacatgctttttatatatggtatactttatcggaatacacagaaaaggatgaggcaaagttgtcaattttggatgaacaatcagcagtgggccgggaacaagcattgcgccacattctaacaggtttttctgaaattggcgccatccacgaccaccaacaaacggtgccaattgaaaatattgccgccctcaagaaatctggctatacagcgttgcctgtagaaacgaaatatggagggagacagatttcccttagcgaaatgctataccttcaacaattgattgccgaagaggacggtccaaccgccttgtgcatcggctggcatatggggacgatgtaccagttggtcgaggagaaaaattggcctaagcattggcacgaacagatcagttgtgacgttgttgaaaaaggggttctcctcaacacggctgcaacagaaaaagcgacagggagtccgacacgaggaggagcttttcaaacgacagccaaatatgaacgaggggagtgggtcctaaatggtacaaaaacctttacgacgcttgccgaacacttagattattatttaattcttgctactgtcgaaccggaaaaacaggtaggcttgtttatcgtaccgcaaaacacgccaggagtgaccgtcgaaaaaacatgggacatgatggcaatgggttctactggaagcgaagatttgcacttgaaaaatgtcaagctgccaagtgaccattttattaaaaagcaagaaaagaatggcctgccaacagcatggctgctccacattcctgcctgctatttgggaatagcctgtgctgccatccgagaagcagcgaagtttgccaattcgtattcccctaatagcattcaaggaacgattgctcaattgccacacgtcaaacaaaaacttggtgaagccgtgattctatatgaacaaagccgccacttcctgtacagcgtggctaataaatgggacaatagtgacaaagaaactcgtatgcagttaaacacagaattaaaaatggtcaaatacgcagtagtcaacaacgcaaacagaatcgtcgacaccgtgatgagagctgttggcgcccatagcctatccaatcagtcgccattgtcacggtattataaaaatgtccgtgccggtctccacaatccgcccatggacgacatggttgtccatgccgccgcggaaagcgtattgcagagggaatcgtagcagctcggatggaattgcatagcgacacaaagccagcctaacgagaaggctggctttgtggggccattttccattcacctaccaaatcacaagcgcgagtatcgttgaaacgagcaagccggcaattacagggataaaacagatccgcactaaatcttgaacatgaacgcgagcaattcctgccacagcaacgagagaagaccaagcgatcaacgtaccgccgccaacccagaccgcccccatttgcccaattgccgccaaagtggctggatcgatccctgaaacaggcgccaatgcaccagcaagagctccagtcaatggcaaaccagaaaatccagagccatcaagacctgtaatcatgccaatcattaacaatccaaatgcagtccaacctggttcggtaggaatataggattcgcctgctttaactaattcaaataaaaacgcgggcgcttcgtcaatagcaagaatggccggagcgaaatcgctgctaccgagaaaaaagaacccggcaataggaataaccggccccatggctttaaaagcaaacaaaaagccatccactaaatgattgctaacatcttcaaacaactgttttggccggtaaaacaagcctgccactagcaagagcaagagcgccgctccaccaaccaatgcagctccactgccgccttccaactgcaaatttgtaaaaaaagacgtatagagcatatacaaaatcactgctaaaaaagccaatggcacgaaagcggcaaatagtttagccttccacgagaccactgctgtgtacctttgcttataaggctgcatccattccttagggaaagacgcacgaagccgttctttccgtctccgtgccagtaaatacagcacgatcatagccgtgccccctgcaatcaaagaaagcaccaaagcccggtcagcaacatcagatacggggacgcctgcggccgtggcgcttagcataggagcaatttgaatcatataatcacttgaaagagccataccttgcccagcgatggcaattgctgccgctcccactagaggaggcaggcccgcgcggatcgccactgggagcaacaacgtgcctacaagcggcacagcgggggtagtagaagggacaaaaaaatattagtttttattaatatcgttgtacatttctattattgctttgttcgataagaagatagaggttttaattgcgtggttcgagccaattaccaattcgactccattattttttacttggtaatcaattttactatcgttatttaaaagtggtttgttctttttatttagtgcttccttttctttagctaattctggatatcgtttgtagtgttcttttaatgctttttcatgagcaaagttaattgattcatcatcaagaactagttcaactctaccgtttggaaatttattcatcttccatgcgtcaagtatagttttgtgaaaataaatatttttgaatatctgagagtaaggaattttattctcctcccgcagctttctaattttatacacagaaatgcctaaataactcgcggcttctttctgtttcataactccattaaaccatttttttgcttcctcttcgccacgaagcacggctccaatcatttaattcacctctaactatctgaatttaaaattagaaagaaccaggtttctcttcgaatgcaatactcgcttcccatcctccgcattcacatcgaatctctctaataatagcatgaccgcttgctttttctccatcggctctaattgatcccagttatctagaaagtttgagagaatagcgacgactttctccggggagtgggattcggtttgggagcttaaatccgctaattctgtttctaattcttcttgccgttttcggtcctgattggtatgctctcgtaattcttccagagaaataacgtcatcagcataggccatttgccattttttcttcctatccttgattgtctgaatttgcttttggatttgttggacacgttgattgattaggcggtcttcgttatgtgaggaagcggctatctcattagctgcgtcgaattggctggccagcaaaagctgtagttcattcaaaaaatgtttttcaacgttttgttcacttaccattggcatatcgcatttcttttctctcttattggtgcaagcgagataagcgtatgtactgttatttactgatttactcatacgtcctttcattggagcaccgcatctggcacacttaatagtaccggtaaagatgtaagttgaggtgactgcttttggtgacacagtacttcttgcagctcgtaaagctaagtggcgatcataacgttctttggtgataataccttcgcaaaagccttcataaaccttgccgccccattttaatgcaccataggagattgggtttttaagaatatcccgcactgttttagcagagaattgattgcctagacgagtcttctttttcaactcatggttaagaataatggaaatagcattgtctcctttaaaattttcataaaggtcatacatatagcgatagagttcagcttcgtctgggtcagctttaagttttgagttttcacctaggatatagccgaagggggcagggccccctggccaacgcccttcttcaaccatttgctccattccgaacttaacacggtcagctaggttttcacgctcccattgggcgacagcagcaactaatgtaataaagagccgtccagttggggtagtagtatcaaatacctctgtcgctgatttaaacatacacccatgtttctcaaactgctcaagtaactgatacaaatccattactgagcgggtgaggcggtcaagtttgtaaactagaacaacctcaattcgattgttcgctatatcatcaagcatgcgttgtaactcagggcgttcagtgtcttttgcagagcggccttcatctatgtaaaaatccacaacgtcccagtcctgggagcgggcaaacatatccaagcgctcacgttgagctcggatagagaagccttcttttgcctgttcttctgtggacactcttaaatatatggctgtcttcatgtatcattccctcccacataaagccttctgacctctagttgtagtaattcttccacatcagccatttgcaagatgaaataatctgcttcatttaagtgttcaggattataacctgtgagaaagagctctttacgtacagttggaatatgaatggtgatgtcataggggtcaaaaggacccttggaaagcgcacctatagtgacagtcactgcagaaagagaatcatgaaaatcatctattcgttcaaatggtgccattatgttataggtaacatattcttgtctaagatccactgggaggagcagccacataggaagtaattctccatcccgatcctcataataaacgcctaatttcataatccatagacccctctccgccctttattattagccaactaatacaacataactttcgtttctttatttatattctctttttcgcctgtgttttaattgtttatattgaagctttgtttgaatgacttttcgatgccgttgtcgttttaacgaattacaacgatcaacaatcatgtccttggggagttcaaagacctcctgcaatgattcaaccgattcatattttagtaacgctggttcaaaaatatgacggggcattgctaggtataacgagatataactagcctgttcctcctgaagagagagcagaggcttgggcatttttctttgattgccgtaatgataaaggtaatgagccaattcatgaaaaaatacgcgacgctgttcataatagggaaggcgattatctaaaaagattaaagcataatcgtcttcaaagatacatttactttggccattgcgataaaggatgtcgatattgaagacggtacataaattctcatatgttagatcggaaggagagtagatgcctaatgatttcatttgattacttattgttatttctctctgcgttgtgtatttcatgtaaaactctcccttaatatataggaatatatgttcggttgtgaattagagaaaacaccctgtatgacagggcgtatgttctttcttctcagggtttttaaaacatttcgggtgacaatttcaacttgtagtcaccattcgatattaaacacgaagtcatcaattgatatgtcccaattatcagatgaaccacctagatgaacagtaacttggttaacctcttcataattgatataaggaaagcttataattccttccgtacttacgccaggaagaagctccgattgaacttctgggtaatcggctgcccagttagaatccgaatcaaactgattgttcccagctaccagtttagcatcgtgcttccaaaaatttatcacatcatcagattgattttcaatctctacaaataatctaaagtcttctgcaccgaattcaattttgttaatggtgacaacatagccagattgttcttgagtttcagctacatctacctcgaattctgtaggtgagacagcatctgcataaccaatcaattcatattcgtaggcttcaaccgcgggtaaagttagcgtagcgccaaatgcgttttcgccctcaaattcatcgataatttctgcctttactttaatgtagtcgtctgttgaaacctcgaatgaattatcgtatatacctacaagcatattgttttcattgttatgtatatcttgccaaacttgtagataaaccccttcactgtctttttcaactgagaaaactttcccaataaattctacttgcgacccaatataatctttgggggaggcaagcatttggtaaaactcattttccgttagcatttcggaagaagatactttttcgtcatttcctgattcgatttcagaagtatcagcttcggtaggttcagttgtattgttagaacatgccgccataattaatacgataaatataactagtatatttaagacttttttcattgggatcctccccgattaacacgttattatgccaacagtattgtccgttgactagggttagtaaatttcttgccttgtttaaatcctaccgattaatttgagagctttttattcaaatttagaaaaccgaagccactaagtaaagctgttaaagctccaattcccgctgcaatcccaatgtctccgtacattagagtagacataagaagacctaagaccccaagtataactaataatattgcaataactttcatatatagtccacctcccagtttaaatagatttaagtttactagcattactttagcacttaataatttacaattgcaagcgcaaactaaagcaaaaagtcctatctatatataaaaaaacaaatgcacttgatgtgcatttaatttaattccatgatttaactaattcgcgccatttttattcatttcaaacttattgaatgtcaaactggtatctgtccaagttatcaatccctttgacaggttcaatctagataggtgcagcccttagttattcttatcctgtttcaaacgctcctgcattcgcttcttcattttccgatattgctctagttgttgttcaataaattcccgctcatcttcatcctcatatttaatcccaccatcatatgcaatggaaatgtcagagttagggttatctgtgcgcccaaggaggtagtctacggaaacatcaaaatagctagcaattttgtttaacgtttcgtaatcaggttgcctaaaatttctttcgtagttggaaagattctgatgagggattttaagcttctcagccaattgtttttgtgttaattcttctttttcacgtaaggatctaattcgctcacctaagttcattgtattgcacctctcgcaagaataatcatattgattgagtaagacggcttgcagagaaggatacgaaatcatattttaacttcattcacgcactcactaagagtgcgactgaagccatccaaaaaaaacaagatggaatcgttatttcaatccacgcactcactaagagtgcgactgaagcctttcaaaaaacaacatgaaattgttatttcaatccacgtgcttactaagaattgtaccacttaaaacgactgttctccaatttgaataaaaaaattatacaaaaagtataattcggtattgacatatacaaattgaagcaagtagaaatgcaatagggatgtctttagtgtcaagatacttctgagcttcttttatttgatcaagagtaaacaactctaagccaccacccacaggctcaccaaaaaccatactctcataaatccttgctccattatgtagagacaagaactctttaaaatctgaaggaagtttgatgccttgatctttttcgaattgtgaaaggtcattggcaggaactggctcataaaacgaacaaaccctttcctctgatgttagaagtgttttaattttaccctccacatttagtgcttctttaagactatctaagatctcctttaaagtgctcgacattttattgcctcctattatctagtaagcattccaccaaggtgttacttttttctgatgaaagtctctaggtagatgaaaaaggttgttcattgcattcgtcccaccatactctaaaggaatgacgtggtgaaggtcataagctttccaacttatttttggatccccatactgaccaatataccacttaatatacttatcgcgaatatttttatctctttctgttcttttatcagcaggcacaaccttcatatctgctcgtgcaggagcgggcatataccttttgttatgtgaattatagtattgaggatacaacgctgcttttttatttgtcaaaaatggaccctcagtaagtcgcgttgtacgtggagctgaccctatccaccctgctgttgatacataatctatcataaaatatttgctactaggaaccttgtaagatttcttataagacgcaccaacttttatttgactaccagtaaattcttttgtatggtgagaaacccttgaaaaagtaccattataactattgctagaatagagtgtacctccagtgatcaccacaacaggtctagtacctatcaattctgtaattttcgctccgtaagtaactgtcttatcggtggtattgaaattagttgttgtggtgaggagtatatagccataacctgattgagcttttatgtcgtctttatcctcggatttttcaaattcctcaagtggggctaattgaacaacatcttcttgagcagatgcaaagtcaaagtgttcgatagtttcttctgaaaagtcggcatcaaactgatttctagcttgttctataatatcagattctgtgttaaatggctcaaatgattcttttgctaccccgttttcatcaacttctaaaacgattgtttcgttaattgttgtatttccagtttcttcatcgtgagcaatacttctgtcaatgacttccgcttgaacagcactggtactcaacataatagttgaagtagctactaacgctagcaaaaacactaaagccaaaatcttcttgaacaacgaaaatcccttctttcttctaatgttaatatatagaaatatattacaaatattatattatcttttttctgaaaaaagacaatagagaggtgtgagattttataaaaaatttataattaaagcaatccgcgatttagttttcctgattcaaaaaagggcgcgcccctgaatatgaactacactacaatgattcgcaccttcccatttttaaccctaaaaaattatcattttataaaagaaggcactgcggatattcaaccgtccttaagtgatacatactgtattctgttcaacgttcgtttgatgtaaaaatagtggatgaaatacaagcattacatggagactacacgaaaaaggaccgatatgtcggtcctagtgattttagaaatttaagcagaacgggaaatcagaagaataggggtaaatgattagcgcatacgttaaggtgtctcccgctaccttgggcacagccggggtaggccaaaagaaaagcgagatcacataagtcatgacaatgagaatgaggtaagaaagagtagcatttttcatgactttcccaaatggtttaatcatttgttcgtttgcccctagggagtcgaggctttgcaacaatgctgtcataatagcgatgatcaaaaaaatgctaaataattctccagctgcgacaaggctcgccgagaaaatggtttgtaaggcggctgcgattgaaccgctaaaagcataaccaactaaaaacgtcataaggattgcagggacaacgacatttttgcgcatcagcatagtaccaatgattagcaaaatcccgacaaaatacagccaatgcggtgcagttaagtccattaggcatccttctttcgtaggtggatgcaatagtgtatgagcttacctaacaataggtgaatagcctaaatctaaagaaaagctaacagaagttaatatctctaaaattaattttagacttttaaaaatggaggccttaatttgttatatcgtcaaaagagaaaaagggaaaagaatattaagaattttttagaaaataacgtcaatagttttgtttctaaatcaaaagagacccactcagcgtgtaggatctctttttaggtataaaatataatctataaagctacaaccatgagtgtgtccaattatgtcttttatatttttatatactctttatatgaagctggttctgaagagcaagacgaagaaatgattaaccatattggaaagtgttgcaccaagttaaagacaacaatttaaattaaatgtatgagccataaggctgtatacgcttttttatatacaaaaggggatgaacccctaaaaggctccgtaattagttaatccatattcatctgcttctaccatcgtattaaactcaagcatatcaccaacgccgttttccggggtaacttctacgccgagaaaaccatcttgagcaatccatacgtcgaaagatacggaatcggattcattaaagtagctttcggaaagcatgaactcaaacatagtctcttcagtgtatgtattataatccatccctgagtagataatgtctttcatctgcgacatactatagttcgattcggacttagcttcttcgtaagactgaaagagatcgtccgaatcggatgagtgctcgtccgacgtatcagcatcattggcatcatcaccagcagacttatttgtatcagtatcttttcttgctgtttcgttggagtcactttcagcggtcgtgctgttagtctctttcgactttttctcactgtcttccgtatcgctttcatcactagtaggatctgtttctttctctgttgtttctgttgtttctgttgtttctgttgttttttgttcagtgttattgttgttttttaatgcactagtatcgttgccgctcccgcaagctgctaaagtgagggcgcttagtaaaccgagggtaacgagtaagtaatttttcttcatttctttctcctttacctgtatgtaattttgtataattctagtataactggaatgtgacatagggtgtactcattcgacaaaacaagacagcgttagatgctgcaaatttaagtagatggtgactttggtaaactgactgaggatgcggtccgacactttcaaaaggtatatcttcctcgagaagttgatggagttgcagggctgaacacttatcgcgaatgggataaagtggtgaattaatacaaaaagtccccgctgaaacagaggggagcttacataatcacttttccgaatactggttaatccaatccctaatatcctcatcatcatacatgtattctccagggctttctagagtatctaggcctgagacaactgttaaaaaatcgaaaacaaccaaatcagttacaaggtgatcgtatgtcatcacatattctgcggcccagtcagctacttcctctttagtaagtttattttgaagtacgagctccagtttatcaataatctcctttaaagtaggttctctcatttactttacaaccttcctatggaattgtcatgtttatcaaaaatataatggaatctagtagcacctgctaggtatccttctcattcttctaattctcggcctgtaattaaatcttttcctattacagcttccaggcttaatgttgccaaccacgggaatgaaatcgagaatggttgattctgtttcctttcctaccgccggtagaggcatcttcaatgccagaagcaagctcattattgtcttgtagtagggatgggctggcacaggcgttaatatatctttcttgcggtatctgcgatatattttgtatttcgttcccattcgcatctagcattgtcccggcaatttggtgatctggcgaataatggtggacaacatcaatatgtccgctagccaagtaaaaccaattagcaatgtttacgatgaacgggttactaaaatagataaatccaaacgggtttggcaaaaacgaaaagttctgcgtatgtacggcatggtctttaaagtgatgataggggttaatacactgtacgtgccgtttagcatatctccatctttgaatggataataaaagcctaagagcatatgtccaattaagtgtatcctatccatttacgctctcctactagtataaatacaaaagtaaagaataaaaatttaagttaaacccttgcaatacaagatatgaatttatataatacgtatataacttgcattgcaaaacatttttttggtaaataccttgtaatacatggtattgggaagggggtataaattgtcaaattcaacacaaatgttaaaaggaattattgatggctgcctactagcaattattaaaaaagaaggtgagatttatggatacgagttggcaactaaattagaagaatatggctttcattcatttagtgaagggacaatatacccattattaataagaatgcaaaaagaaagcttgttaagtacagcattgaaaaagtctacagctggaccaaaaagaaaatactattccatcacgggaaaaggagagcaagaactattagagtttacgaagcgatgggaaaaactaaatcattcagtaaataaagttctcaaataaaaaggagtgttaaaattgatttcaaaagagggtaagcaatatattgaaagtatgcgaggttatctaatttctcatggagtgaaggaatcagaaatggaggaatttttagaggaagcagaggtacatttaataaaaggtgaacgaaacggaaaaaccattgaagatatttttgggaaatcacccaaaaaatatgctaaagaaatcgtggctgtatcgacaatttcaataaaggaaaatatcaagcatattattaacctgattatcggaacttttggattcattataacagctatccttattaatagaccattagaattatctgtacttgaattggtggggtaccctgtcagctttatactttggattgcttttgcaattgccacacttcgtatgacagcatttaagagtaaaacaaatgaattattactaacgtttttatgtgcgttaataccgagtgccgtaaccgttgctgtcttaatctatagtcaaagctataatgaaacaatattaactatagaaggtattccaagatatgtacttgggagtattttaataatagttatgattattaacttcgcagttttgtttaatttaaaatttagttttctttacgtgattttggtctttggcagcttatggctgtttgagtatttcaaattagagcaagtgatgtatagtgagttaaggtttgtactcccaggtgttcttacttatctaatgtggcgattttacggaaggaaaatattacttgatcagtaataaaatatgattattagctgttaaaaatggattattaaaaggtatggtaaacgttattttgcatggaaaaagggagctctattctagtagaattaagttaccatacctgtatatggatgcgatagtgtatgagcttacctaacaatagactttacctctaaaaagttaacgacttcttgtgaaaaggattcatttttaattggaacaatgaaaagcccttccaatgttgaagggcacttgattgttcttattcagttcgatgtctcattttatgggatattctaaaggacgcttcaacgcatatgaagacgacaaagaatataacaacccagctgattagatcggtccaaacattggacatgttaattacgccgaaattacttaatcccgtttgaatcacaaacgtaaccaaggcagtgataaacacagataaaaaccagtttgttttcttcaagaacgacacctccttatagcgatttgcatatatatttagccgttttggtttcagcacatccttgacaatagcagggttgatctcaaaagcaaaaacagggttattaactgtacgttttacataaataaatttataaatatgacttacatatttatataataacaagaaaaaacgttattttccagacgatatattatatgaatcgtaggcaagaaggctggggcggcaataagatatggccacgttgttatgaataaactaagagccccgccttaaaagtaggcggggctctatactaaaagtcaatttgaacatctatgtcatggcccaagctttcaaaatttgcatcgtgtggtgcgttgattaggactctcacccactcaatctcattaggatcagagctttcgagcatataacgaacgctgcctgatttattaacagccccaataaacactccaccgatgtgatcactagtcaataaatctggttctagttgttctcctgtattagtagtgatcgtggcttggtccatataaaagttaatggtgtcatcagatgaattcgatacttccatatctatttggataactccagttggctcgaagtcgtaggaatcagctagttcctctggccattccacaacctctgctactgttacttgtgggaaatggagagaaattgatgctgtttcaattgtctcagatgtatcattacgcgctaacaatttaaagttgccatcttcattcatatctccgacttggtattcccaatctccctcattagcatcttcctcactgtcttccgcttcgctgtcatcacgagtagaatctgtttctttttcggttgtttcttgtttcgtgtcgttgtttttttctgatgcattagtagcgtcgctcccacaagctgctaaagtaatgacacttactaaaccgagggtagcaagtaggttgtttttcttcatttctttctcctttatttgtatgtaaatttgatgcaaatctattataaagggaatgtgacatcaagtacaatcattcgacaaaaagtggtatttaatttacttacgcttcaaagtttcatggaggctttagagctaagaaaggacaagtagccaggaaacaagcaagccttagggcccttagggcggcgctcttctcctctcatcaagtgacaaaaaacaaaaacattgtacttttttttgataaatgctgtttttgttctctattaagaatgaagcacaactaatacttaaggggatgagaaacatggaagaattaaaatgggaaaaagaggttacttacattctagagtatgaaggggacgtgtataaagaacatcactttgtaaatggtattgacggtagtcgttataggtcaataagtgaaaatgttgatacgaacccaccaactttaacaactcataaaagtaccggtgaagaatttaaagagatgaaagcggagttggttgcatcccgtgtaatatcccaaaatgaaaattttaagtcagcggaattattataccgtttaccggatacaggtcgattcttgagattactgtacagaaaagaccgttatgctgatttttatttctctatgatgacatattaacctgaatatagagcgtgtatgagccataaggccgtatgcgcttttattattaaaatatgctagaacgcacgaggaaagcaactaacggggacaagggaattaagtaatagacctgaccaacttaccatcttaaagttggtaaatctatgaccttacaaaacatgatttaggtttatggcgtttgcacataaaaaatgactagccgtattataaacaggacagcaaccatttatgtttttgctgtcctgtgcgttttatttgaatgacctgtctacagaattggggaatggatccgttgtcggtttctttatacttgaatagtaacatgacttttaaggacattcgtccatttgctatatacgacgtcccctgtatatttttcaatcatgttttctctgcttattttactcatttccgccactactccaggactttctaataggtaaataatcttttcggccatcttttgtttgtcattatcctcaataatgtatcctgttatgccattcttgataatatcggaagcgccatagttaaagttgtaagatacaatcggcgttccgttcataagagattcaattcctgctaaaggtaacccttcaaaatcagatgttaacatgctaatacttgctttttgaaattcctttgggatattactcgaatatccttctaaaaagacgttattctctagttttaactgcttaataaggttccgtaggttttcttcttcaatgccttttccgaaaatggataaagtagcttctggaagttgtttaacaacgagtgagaagacatgcagtgcttcatctaatcgtttttctttctctagtcgtgtaaccataatcaccttaagggggtttctggcttcattatagagctctggtactgagagaggattaggaatgacataaatattatcctcacctggaaagtctgctaatatatctcgtttttgtttttcggttaaaaccactaggccgtctagcgattgtctgttttcaaaaactggtttgtacttagactgcacatgacttcctgatgtataaggagcctcaaggtggttactatggacggtgaaaaaccgcaaggcatggtcagggttaatggctgcaacttttgtgccgcaattttgcccatgggcgatgaaaatgggttttgtttgattggcggcattattggcagctagttcatttaaccaatgtcgatcaaaggctttggcgcctttaaaagcataaactttttcatctttccggttaaacaaataaaattccccagaaacgcctttcttcttaaagtgccttgtagaataacagaaatcgtcatttgtatagaaagactcttgaatagggtgtccgtcttggttgaaccagacttttctatcgacaaatccctgtttattaaagttcacttctaaataaggctgatttccaaattcaaaataacggacggctgttagtctagcgtcactatacgttttcactttttttaatgtcccatccacaaagcaatagcggttattgtcgctgtcataaaaaaaggctacgtcttcattcgcttcttcttcatataaagcagcagttggttttgagtcaggcagtgtgttctgatttctatagtactcaaatttgtttaaatgctctaggctgggataaattctccccatatccgttagctcttgaaaaatagattgataattaggttgataatcgaatgtagtgacggtgaccttatgcccattatccaaaaacaactttgattggttaaatgcggcaatagttaaaccgccagaatcagacaggatattgtgagtaactaaaaaaaaatgtaacttgtccattttaatcctcctcgaacccagcttaccatacttttagtctatattcagtaataacccttagtgtggctgcttacataatcaattgtttgaaaactttttgatccaatctcgaatgtcatcgtcattatgtagatattcgcctgggctgtcgagtaagtatggaagagaatgcccaccgtattatataaagggcgtgtatgagccataaggcaatatgcgctctttttacggacaaatgatgctgtccagctttgtgttgacattgacattcttatatacagaggcaaaggcctacgggagctgttccacaatctacctgaaaggttaatgcttaaaagtcgttagttttttgtttaatcgccctgtcgcctaaaaagaagggagatctgtgtattttttatgggaatgggaggaaccactctttttttgtcgtatatcgtattgaataaggaggaatcaattgaaacgaacaaataacgtgcttaatgaagggagaacgctattgaatcaattagtgaatggccatctagaaaaaactagaaagaaacttgtaaaagaattggcgtcattaagtgatgctcaatttaatagtaaggctgatgtaaataaatggagtatagcgcaagtttgccatcacttagttttagtggaaaaggcatcattaaaggcaattacttggggattgaaaggatcgaatagtaatgaaaataaacggaagaatgttccccttatattattagatcgaaccaaaaagattatagctccaaaaatcgttgaaccagatgaaggaccttttgaagtggagcaagtagttaattggttaaatgattcaagggaaaaattgatgaattttcttaatactattgaagataagtccatattagcggaaaaatctatgaaacatcctgcgcttggcgaattgcctcttgatcaatggattgaacagatatatttgcatgaacagcgacacatcgaacaaataaaagagataaaattacttttagatgctaggtaaaagaagatgaaatatttatataaagacatcttctttttccttacatcttgttgtgaatagtcctaccggatagggtcaattccgggaaggtgggaacgaatagctctgcctcgtgttgccccaaacggtttaaaggatatgcccacttgcagagctattttagccgttaatcttctagtgttaaatcgttgtataagtcatgtaaggattcagtttcaatgtcatttagcaatttttcttgatctttatttttataaataagcttccattcacttccgggtttttcgtcaatggcacttacgccatctaaaacggataggagcccaaaaagtgcttcgtctatactttcgtggatgatttggctaaccatttctttatcttttgaatctaggttattaaaccatttagattgtgctacaagtttggcccttggttttcttccagggggtttttccaacttttgaatgagtcctgcactcgcttcatctcgaatatgcattttaataaagtgaacaaattgttctttattcatgttatgcagactccccatttaatcgtccttacacgcatatttttctcctatacataagcgcctcgatacacatgcctgaacacccctcattctcattctccaccaaaaataaatttctcaattgcttttccaactccatcattattatttgtatcagtaatagcatcggctacttgctgcactgctttttgggcattgcccatcgctatgccgataccggcagattgaatcatttttatgtcattgaggctgtctcctattgccattacatgcttcatcgttattcctaacttttcacaaacccattcaagtgctgcagctttattcacgccggtaggattgacttcaaccgtgaaggctgtccggttgctaacttctacgccgtctatcgattgcactttctctgccatcttatttaaaacttcttcatccttatgggagcagctgaatttcagccactggtatgcgctgcagttttccggtaaatcgttataatacgcttcctttgtggagatcgtccatgtattcattccgagtccttgggcaaagtgatataaattagccagcgtggctgcatcgaaaagatgttctatcataacagaatggtcgactgcgtaaatttgtccgccattgcatgtgatcgagtgggaatgtaattgcaaatcttgaatgtaagtgtggcagtggggaaagggacgtcccgtgcataagacgacagtgatacctgcatgctgtgccttcctaatttggtttttcgtccaacttgtaatctctttgttatcattcaacagcgtaccatctatatccagcgcaatcatttttatatctgtcatccgttcaacctccgtaggtatgttctgtattttgggtttaggaaaaggagaagggctgctcggtttcgtctagcaacactctcaccatatcacctcggttcgaataattcattactccgaaaatcattttttgaatgacctaggtcattttccattacctaaataagttaataggaaacggaagcgcttcaactaattttttatgctgatagaataatagcagataaaaaaatccaagtatgcatacactcgttcatttgattttttatccaaaacgtaaatttgatcatagagacaagggaggtttttagggatgaataaaagaaaaattggtgactccatacagcaattcggcagaacgttgcttctcccgattggggtattggctccgatcgggatgcttttggggatcagcggagcgcttacgcaagactatatggtagaaaaagttcctttcctcggtaacgaggccgtcaatactatcttggtaagtataaaaacaatcagtaatgttgtgttcgataatatccctttattgtttgcgatgggtgtcgcttatggaatggggaaaaaggataaaggtatttcggtgtttgcctctgtggcaggatatctgaccttaattgttgcaatgaatgtatggctgaccatcacaggaacgatggccgatcccgatgtgatgacgcagcagggtcagatcaatatacttggcattcaaacggtcaatattagtgctgccggagggattctaaccggtctaatcgcggcctgggccacggaacggttctataacctagaactaccggctgcactggcgttcttttctgggaagaaatcagttccaatcatcacgatcggattgatggctaccgttgggatgttgcttccgtttgtctggacctattttgtaggtttattgacgaacttgtctaccatctttttaagtgtggtcggtcctttctttacagcggcgggcgaacggctattcattccgtttggtcttcatcatgtctggaatgccttgttccgatttacggaagcaggtgggtcctatgtcattgatgggaaaacgtatgtcggtgttgtcccagcgattacggaaattttgtttaatcaggggccaaacagtgagtattggtccatgatgccaaagctgtcccgattcatggctcagcagcaaatgcttgtcgtcctgtttttattccctgccattgcctttgctatgtacaaggctgcttacaaggaaaataaagtctatgtgaaatcgatgttggttactatggtgcttacggctgttctaggtaacgtaacggaaccgctggagttcacttttgttttccttgctccgttgttatacatcgtctacgcatgtatcgttggcatcggtgctgtattgctgtcgcttgcagatgtttccattggatatatccgggggaccatttttgattttacgatctttggactcctttatgaaaactcacgatggctctttttggtgttaattggtctaggattagctgtcgtcacttatttcattttttattgggcgattatccggtttgatattaaaacaccaggcagggaagaactgcaaaacgttgacagtaccctacttaaagaaaagcgctacgacgagattgccagtaaagtagtggaagcgttgggaggaaaagaaaacattctgaacgtggataactgtattaccaggcttcggattgatctaaaagaagttagggagattgacaaagagttattgaacagcactggctgctccggcttctttttcccaacagcgaagcatattcatatcgtctatgggacgcaggtagaatttatcaaaaatgcagtcgatgaaaaagtttagaggcataaaggagtgatagtatgaaagcgttatatgattctaaaagtaaaacaattgacgatcgtggtctgaaaaacctctttacagagaaggaaaaatataaaacttggctcttgtttgaatcggcattggctgaggcacaggctgaatatgggcttattccaaaaaaagctgcgcaggaaattaaagaggccgccaaacttgaaaaccttgatctcgaagaaatggaccgtatttacaaagaaattggccatggctttgtccctttcttaaaagttctcgtcaaagcatgtccaccagatagcggaaaatatgttcactacggaatcacaacacaaaatatacagcaaagttcgcagctttatattttgaaaaaagctcatatgatatttatgcgcctgattggtgagattttagaaaacttaagcattctggcctcggataacaaacatacggtcatgcccggtagaacgcatgggagacatgcgattccgatcacatacgggtataaagtgtccgcttggataagcgaattgatcagttgtcatcaacgcatggctgaagcggaaaaaagagtttttcaagtaatgatgggtggggcagtcggcacgttcagttcaatgccggagataggaataaacgttcaaaaccgtgtggctgccttagttggcatgtatccaatgactgtgccatctagaaatattaacacacataaattggaatacatgtcgaatttggccctattggcaaattgctgccataaaatagctgaggaagtatacagtacaacattggaagaaatcgctgaagtatccgaagggttcagtaaagggactgtcggcagcagtaccatgccccataaaatcaacccaaaacttgctaagggaattatcgcaaatgcacagaaactctattctcttcctagtatagggatgtattcagctgcacgtccatatgaaggggacagtagttcttatatgctatttgaaggattgttggaagagtcgatggaattgatgacagaaattttgatccgctgtgaagaattgacccgtacactgaccgtgcataaagagagaatgctccataacgccaaacgcaacaaaggccttgataatagtgaatacgtcatgatgaaactagcagagaaattaggcaaggatcaggcccattctcttatgtatgagattgctatgaagacagctgccgaagggcaggaattctatgataacttaagagaaaacaaacaagtccgggcaaacttcacagataaagaaataaagcatatgattgaacctgggaactataccggcttagcagctcatttagcggaaaaagaggcggagcgggcaaaagaaactgcagaaaaaatccgcgaaaactacagccattaatgaacgacaaatagcgttcttcttttatggaagagcgttatttttgtcgtttttactagcaccactgcctacgcgatttaaaggttggccaatttatcaaccaacaagtcaatcgtaagaaaaaaaccagttcttgaaatggtgtcatttttgcttgtgttcgttttgtcggtataacaaaataggttgttcgtcgtataccgggtcaattcatttgttttgaatgaagtgatactaatgatttcggctttttttaaatgaatttttttcgcagtattaataatttttttcgtgtctcccgataaggaaataaagatgacaatatcctcttcggccacaaaatccgtaaacacttccgataaattgtaatcctttataaagatacattggatgccaattgtcaataagagatgctccaaataataaccgacagctttgcttgttcctctcgccataataaatacatttttcgcagctttaattttggcagctgttttttgcagctgctcttccgtgacaagggagaatgtcttatccatagactgttttaaaatctcccgatacaggaccgtgcttgtttcctgtgcagacattttttcaatgattctctggctgatataatatttcatttctcggaaaccggaaaaatctaatttctgcgccaaattgataatgaccgtttttgaaacaaacgttgcctctgccaaatcattaattttaatatggggaatttgatcttgattttccatgatgtagctcaggactctcttttcacttacggtcagttcttcatagttcttcaaaatatcaaacatattctctccatccaatcaaagttctaaaagcaatacatattgtaaatatagtacaccggatgggaccattttaacagagcccttgtatttgtatgtttttggaggagaatgttgccgtgtatggttgttcggcttatttgctaatggtggagtatgtgagattaggctttgtacccaaagaatgacgttaatgacttgggcgaatcgggatgggtaggcggcaagagccgcctgtaagttattctccgttaaatgcatgtgtgatttcgtcgatttcttgttcgatcgcgcaaaagatggattcagtcatcgcttctacctcttcacgtctaggatcgtcttctttcatccggccgaaaacgaaaacatttttcatgatcacacctccttatccaaaggatagtgtgtgacgtaagggaactgtcaactgtcactccaactttttgtagcttagtatccaaacggaaaaaagcagttatttcttttctaactgttcgattcgctgctctaaatctttgatttttccatcttgtgttttggcataagtaaaggcaatagccgatacagcaaatgcactagtttgtttgcgtggtttttattctaattgattttcttctatttgtatcgtaatataagatataatctgttggaacgatataaatgaggtgttatgatggacaaagtaagtatgctcaattcgaattggacagatatttattatcatttgagacatgagtatgaagaaaaaattacacaccaaagtattaggatattgcaggtcattgagaaagaaccagaggcaggcattaagaaaatagctgaatgtatccagatttctcacaatacagcctctgaacatgtaaaacggttaatgaagaaaaagtatgtttataaaactcggagtttaacagatgaacgaaaagttgtattaaagctcacacatttaggagaagatatccttcgtaagcatacgagtttagatgaaaataaacttaatgacatttttaatcgtttaaccgatgaagaaacagaaataatactaactggatttaaattacttaaacagaaggctagcgaaagcaatgtttacagtcattaaaatagggatatcagcgatcattattgggcttattactgctatagccagtcgctttcctacttatgtgggtatggtggctgctttgccattagtgagtattttaagtctggtatggctctatgtagaaggccagcaagtaaattcacttgcgaagtttgcttttggagtgttagaaggattaccgtttgtcttctcttacaaaatgtatgtgtaaagtttattttttgactatacccaattcgacatgaaaagattcagttttagttaatgccatgacaaacttcgtacgacgtttctaaaagggacggaagcctaggccgctgtcttttttatgtgttatcataaggcataagaggtgattggaatagaatataaaacaatattgttaccggtggcaaataataacaaaaatgcggcacggatcggtgacaccctaaatgaattggccaaggaaggttgggagctaatctcgctggtggcccaacaaagttatggtggaactgacgggaatctagctgtatttaaacggaatccataaagcaaggtttctactccgtcttttctccgtgacaagtttcatgaagatttgaggctacccgatccagatgctaagaacaaagagcgtgtatgatgataagtcatatgcgcttttttaattgaaaggactacaactatgagtaataactgtaaatgttgggtaaagaataaggaatctacttaaaaggagactgttaaacatgccgtatttaatgaaagtatacgttgttgggagagacaaacctgtttatgaatcagagcggccggatgatgatgtgaaaaaagcagttagggcgattgatgaatctttatcgaaaaaccaatttgtgtctttcggtatgatgggggaggaagaggttattgtgggctctcgcaatgtaacacatattgaaatcacagcccttcaaaaagagtgacacgagggtagccatgtggctgctctattggaagcttaacgtggtatagggtaggcaatgatcatctttttctttgtaagggttaggtgtgaaagtggtgctctaggttgattatttgattttttcatcttcatcagcaagtggatccacccaatcttctctatcccattcacgcggttttcctacctcacttgggaaagatctaaaaaaggttactagtaaagcaactggtagagctaaaattgctataagaggttctatttcaaaagaatctctttttccttgcaagtaaaggatgtattccgagctgtgataagagataaagaggccaattgtcattccgacaatgtttgtaatttttcgcatcagtatcctccaaattatggatactttcattgtaaatgttcatcaatcgattgtctataagcttggtgaggaggggaagcagcgctcataaagagcaaacgaaaattacttctcaatatgctgataccgatatgatgggcgtcgtataccacgcaaactacttgagtttattagatgaccggcaacaaaaacaaagatctttcaaaagttaatttcgatgtattaaaaaagagtattattgaagaagcgaagctattcatagactttgtaaaaacgctccgctttagagaaaaatcaaattatgaaatttgctagagcaataagtactattcgaataaatatgagttcgaaacattgaaaaagcaaagcccgtcccttgtttttttacaggcgcgggctttttattatacgaaaagttatttaactggagacattactccaataatttgtctagttcttttttgacgatggtggcctcggagcctaggacgatttgtacgttgtttttgtcgattttgatgacgccgtgggcacctgtttgcttaatgcgatcgacgtctacgacttctgtatcatggagttcgagacgaaggcgcgtcatgcagttatcattcgtgataacgttttcttttccgccgataaattgcaatactttcttggccatgtactcgtgattggaatgggacaacttcaactctttctcgtcctctgaagattgttcgccaaagtccagctctttttctcggccaataagggggatgtcctttttaacaatcataaaataaaacgtgaaatagtacagtgcaaaaaaggcaaggccaactggaatgatgagcaaccctcgatctgcgaggttcaagtttaagacgaagtcaatgacaccggctccccatgaaaatccgtgcctgatttgcaacagataaagcacagctcctgccagcccagtgtataccgcatgcataaagtacaacagcggagatgtaaacaagaatgtaaattccactggttctgtaatccctgtaataaaagaggttccggcacctgaagccattaaagacttcgtttcttctttctttttcttcgcagcccgggtaatggcgagagcgatggccggtacaccgaacatcatcgtgaaaaaaaacccgccgataaagtatccggctgtagggtcgccgcttaaaaagcgggtgatttcaccattcacaatttctccagaaggcgtctcatattcccccaagccaaaatagacgtacgtatttacaacatggtgcaaaccaaatggcagtaagaagcggtttaagaatccaaatatgaacacgcctagcgcgccaagccccatcaacgttttactgaacgtatcaataccggactgtgcgtatggccaaattaatgacatcagtccagctactggaatcatcgtaaagataataaccgtaatagggaatttttctccgctgaaaaaggccagcatacttggtagctttgtatctttaaacttattatagatgaaggctgcgattaaaccagccaatacgcctccgaatacgctcatattgagctctgggtccataattgttaatccttcttttaagacaagaatggccagaaaacctgtgagtgccggtattcctttatcctttgtttttgcaagccccatcgcaattccgatcgcaatcagcgcatccatctgagccaaaatgacaccggatgcttggaatagagggatgtccagcaaatcctcggcacttaatcgaaggagcagtccggcaattggcaaagcaacaattggtatcagcagcgattttccaaacttctgcaaaaagcttttcatcatagaagcctccctatcgtccatagtatttagatcgattgatacgtgaccagttgaatatctttacgtgaccgaacacgtgtaacgatttcctcatcagttaaaaattccagttcgtccactcttgggaaggtaaacgaagagctagccagaagttccttgtctaaataggccggatgagacatgacttcaaccgaatcatggtttttaaacagattgtctagcgcctcatcatcttttaacgtcgtttcaatcaaataagagaaggaatccgttgttttgattcctttccgcttcagttccgctgcagttttctcccccatattgtttcgtaccggtagtcgatactctttggcaagcgtcaaaaatacgtcggggatgctgccaaaggaattgacgtgatggtggctgtctaagtgcgtcggttccaggccgtaggacagaaacgcttcgatctgcgttttccactcagcataaacctcgtcgtaatcaatcgtgaacgctcctttatagaaatcgagtttacggaagtttccttgaacatccacgatcgttttgtgggtacgaaggagaggcctgccgcaagtcagtacaagatgaacgccaattcccaagtcagggaattggtcggccagctcggctgcgtggtccgctcctggcatgtttgtcatcaatgtcgttgaagttaaaatacctaaacggtgcgcatccacaattccgaaattaacgcctcttgaatagccgaaatcatccgcgttaataattaattttttcatagccgttcatccttttcttctcttaaatttagtaaaggtctacgaactttattttaggtctggccagtattctttgttggcagcaatgagatcgtctaatactgctttggctgtagatacattaataacagtacggtttaaagtaagggcttgtagcagtttctggtagctcttctcaaagtatgcgtccactaccaatttttcataagcgaattggctctctagcaaacctttataaaaagtaggaatagcgcctactacgaatggttgggcgccgttgctcgttaaaagagctggcacttcgaccatggcgtctgccggtaagttggagataatgccgcgattctctaccatcacaatgaatcgtttgctcaagttgtaagctagcgattcagcggctttaatcataaacacgccgtggatatcgacatggaggtccgcgccagcagctgtgccattttggatgatttcgtcgcaaagatcatggatgcgtttttggcggccttcgatcacttgtcttgccctagtgcggttcgggttttctttcgccgccattttgtcaggatacaaataatattgtaagtacgtattagggagaaactctggaaaatcaatgagcatttgccgagccatcgcaaacgtctcctgccatgatttgtcattggcgatttctttatcttctggtttgaaaccattatgaataataagttgctttaatcgttccgtatggtcggtaccgcttttgtcgtatattttcgtaaaccagccaaagtgattaaggccaaaatattcagggacgagctcccatacgtccagaccaagaattttcgcgtagctgatcataattgcaattggcatgtcgcaaatattcagcaagcgtgtatctgtcggaaattcccgctttaatgcctcagccacaatggcggccgggtttgtatagtttaaaatccaagcattcggagaatggcggcggatgtcttttacgagctcaatcatatccctaatcgaacgcagcccgtaagccattcccccgggaccgcatgtttcttgaccgacaacgccgtgctttaatgaaatttgttcatcctgctctctcatggctaagccgcctgtacgaatttgaacgaatacgaagtctgcatccttaaaagcttcttttttgtcggttgtataagagaatgacgtcaattcaggatagcgttccttgaaaagaatctccgttgctttggctgtacgttcctgacgttttgcatcaatgtcataaaaaaccaattcttttagcggaaagcgttccttctcttcaattaagctcatcatcattcccatcgtgtaagtgcttccacttccggcaataaccaatcgctgtcttttcatgttagctcctcctcgcgtggttgcttgtcttataattctgttatagcaccatggtgatacaaaatcaatactaatcttgtattaaagttgtattatttatttggcgcaaccaatttaagcgtataattgacaaacaaatgaatgcttcagttaggagacaatattcctgattgaataggcgttttcaggtatgctgcgagtggaaagatagaagtttaaacggaaaagatgaaaacaaaatgatttttaggtatagttgtatttaagacaatacaaattaaagatagaaaaacggaggtatttttttcttggctattcactctcctctatataaacaagtagcggaaaaaattaaaaaggatatttttgcattaaaattaaaaaaagatgaagccattccttccgagaataaattggtagagaagtatcaagtcagcagagttacaatacggcaggcgattaaacttctggtcgaggaggggattttatacagcatcaggggttccggcacatatgtaaaaacggggaaaatcgagcaggacatctatcgcttacaaggctttaccgaagagatgatttatttaaacaaacagcctgctaacgaaattcttgatttttccatgcaagaaccaactgggaaagtgagagaaacattacaactggaagacggagaaaaggtattttttattcgaagattgcggctagctgatggcgaacctctcattttggaggagacgtatatgccagtttcgctgtttcctgacctatccgtcgaagtaatgacccgttctaaatatgcctacgtggaaaagaaagggtaccgtattaaggaaagacagggggagatcttcccgttgctgccggatgaacagcttaagcaaacgttgaagctggaagaaggagagctcgtattgttcatggatctatgggcttatttcgaaaacgatacgatttttgaatacacgaaattatactttaggagtgagaaatacacgtttaagttcacttcaaaacgaatctgaatgttatcccttcacacgctttgcgaaaggggatttctcttttcaaaaggtgattatgaaagggtgaatggatgctgcgtggtgcgattgtattctgataacgtggtactggagcaaaactaaatagtatgttgacaggccacgcagcaaaccgaatgactgtaataaaagagaatagttcgtttttacgtatttttttgtgtttgcttactcattgtccactttcctgaaatggctgataacataagccaaggctcaataattaaattaatcaacatatgagcaacgattggggcaaacgtacttcttcctgacataatgtacagtgttgccaaaaaacaccctaaaattgtagttgaaataatgacaggcaagactattttcatgtcacgtcttaaaattccccaagccccatgggcgaagccaaatgccgctcctgaaagtatgatttgcagaacatcagaaacatggagagactgtaagaaatccatcaatagatgtctaaacaagacttcctcgactatacctgtagccaatgctgcccacactccaatgattttaagccaggacatgtgaaaaaggtgtgctctaacaaagggtaaggcaatgattgtatagacaacataacctaatacaatgatgaaggtgaatagccatacgtaaaagtctgcaaatacaccttcgtgaatccccatccttgtttcgataaagcgcttagggtttcctataaaccaaaaaagaatactggtggttaacaatagagaggtactagccaaaatccaacccgtttttactctatcatgatgtgtagttaaattagacaacctatcattcctcactttcagctattttcttcactcattatagttttccggtattacaaatactattgtctggagtcatgaagtctctgttaaaaaattgactaaagtcactcgttactcaaacggtcttttccgactatcatcatgtatggctgtaacgtcttcaaaaacgcgacttctccgtaaaatgccggcatgttaaaaaaggtgcaagccttcatggctgctgtgcacctttcattgtttatctgtttaagctattgtggcttaaaactcgaactattgcatgaaccgattgggccacagtatttaatagactgaaagaaaaaataaaatagctatagctgaggttgtgttaggtcaggtttgcatagattgactgtttaaagggaatacgtcaacagtgtatataaaaaagactattctttttttgtttaataagagcgctcttttataaatagaacaatgggcatgggtctatatagatgtttattcgacagggtgatgcgtattagggtctaaagtcttgtgtctatagatttagatgatatcttaaaaaaagtagttaaggatacacttgtaaaaaccaagcctcttgagcgctgatccatgtgaaaccggtttaatcagctagggaaatggactctcttatttttctgtcctaatatgatagaattaaaaatccatgaaaagaggtgaagaggttgaagggaaagtcgttcattgttgttgcactcctatttagcacattttttattttcttggaatcatatgcttctgcttatactgtccaaacagggacagtgatcacaaatacgagtttaaatgtacgcgagaaccctagcaatgatgctcctgtaattggccagttgcagtcaggagccaagatagagtacgtggatgttggctatgactgggttcgaattacatacaacggaaaagccggatatcttaacagcctttttattaagggaaaccggccaaccagccaagcaacgggtcatcaagcagagagccatcaaacaacgagccatcaaccacctgctgtttctggtgtgaacgttggtaaggtaacagcaaaaaacggtctgatcgttcgtgcacaagcaagcactaattccgcaatgcttgggaaaattgattatggttcaatggtcgagtatcgaatctcaacggatggttggggccaaattacgtataatgggcaacgggcgtttattgatacctcgtatttatctggttctactagcaatgaaagtatatctggatcgaccagtaatgaaagcaaaactgtcgaccagcaagcagctgtaacaggaaccatttcccgtgttgtcattgatcctgggcatggcggtagagaccctggcgcgaaaggaaatgggctaatcgaaaaaaacattacgctcttgttcgctaaacaaataaaaaaatctttacaagagaatggtatagaggtttatttaacaaggtctagcgatgagtatgtttatttacaagaacgggctaatatcgctgattcgttccaagcagatctttttctgagcattcacgcaaatgcccatgaaaattcgcttataggaggcatggaaattcattcgtttgcgccaagcaacatagccgtaaaactagaaaatcagttccgtgacttgccaaacgctgtttaccgaggccattatgactcgaatttttatgtacttagaaatacctcaactccgtcactcttaattgaattagggtacgtgtccaaccaagcagatgctgcactgttgcagtcacaacaatttcaaattcaagttggcgaggcagtaaggcgtgcattgcaacattaaattgtttcgccacaagcctttaggaagtttgacgcatctataaatatagatgcgtttctttttgccttttttcaggagtgactgtaaacgttcatgcaaacaaaaccgtggaatgggtgaaagttagttatttaaatcactaattccagggctgtgttcattcggcatttcaggaaattgtggaacagggaaaccttctggaggaggagtgactgaaaatgcgccttcgtttctgctcggggacttcccttgaagaatttctccaattcgggtttcgtctaatctgaaattgaactggatgttatggtagcccatatcaacaaattttcggcattctggatatttattaatgtcgtaatttgggatagggaataatttgccccattctacgccaagtgtttcaagtgctttcgcaaatgcattttgatgggcattatctcgaacaattagaaatccaagtgtttctctaaaggttgcattggaactcatttcataaatgcgagttttttggagcacgcctgtggattccaatacaacgttattgagcatatccgctgctaagtttccatggctgtacacccacgagccattccatgggttcccggatgcgtcaaaaggaagagaagcttgggcacctataatatagtggtggggattggcatcttgtaaggccgtatcgagaggagcatgattgggggcttgatttcctactcctgcttcccctgattcgtcaagcaatgcattaatggtcgtttggacgagctctacatgggcaatttcttctaggaaaacgcctcgcaacaaatcacgatattgtttatccttccctctgaaattggacccttggaagaaatattgcatcatcgtgcgcatttctccataatgccctccgaggatttcttgaaggactttagctgccgctggatccggtttatcaggcttaatgatgttaattaattcttctttgtaataatacaaaggtattcctccttatcggatcatcgttaactgcttttttagtttgaacaaatgatttccaaatatacactaaatctacaaccgttttttacgcttaaatgctgaagttgtccaaagctaataaaagttcaggggggatattgtcttagaggaggcaattgttcttaaaaaacatgagagtggaaatgaaaaaggaacacggacgtcttaggagagagaaaaacgcccgtctgttgttgctgattttgcggaaagtgaaggtagagatgatacaacaacatcaaaaccatttcctatatgaggagaaatcatccgtaagaataagaaacattaagtcatttgtgcttcacgttcgaaatgtgcagcgagccatgtgccttcgctcataaacagtttaaggacatgttcacggcttgttggcgcctcttcgatccatttctgcagcatgcggacgataggttctttatcctgataatattgaataaaaacatcggactgttcatcaagttttgtcgtccaaacttgagagcgggccatcaccattgaatagtatgtgcgaataagcttgcgggcgaaatttttcgaaagtttttcaaattcttctgtgggggctgactgtaaccggtcaatggttcggtcgtaaacatcaccaatgtcaccattaaagcttatggcgatctctgcagtaagtttgtaggggccgaagcagtctcgaagatcggttccgtaaatacaaacacagagttcttttagaaaagcctgttcgtaataattgattgggttcatcacgtgatcgagatctgcaactgctataccaatatcgcggattaaatagcggtatgtttcagacagtgtcgttgagagtttttttactttcattttctcactagcatttagtctactattgaacacagctaaaagatccaggtctgacttaatcgcgatcgcatctcctcttgcgacgctgccataaacatagacactgtgtaattgatttggaaataagcgagatatttgttctacagagtgttgaatgcatggctcgtatacttcgggaattttatgtatggagacatcacttgaaatatagccattgtcgtcgagtccataccctgcttgcaaatacgtcattttatgtcctccttttccctttactataccaaaaacgattactggttgcttttatttttatcataaaacgctaacggccttctcccaaaggctgcatcgctcatacagcctgggcgtatcaaaaaacgcaatcgaatgtggaacaagccgcaggaggatcggttagctgagaggaaatagttggtcagtccacttgtgtgaaggtcatatcctattagaaaaggagcagctacagctgggcgcaggtttactaaaaagatgagaactagtatggatggtattcgtctggacggttgttgtcttttcgaaaggcaagccaagccgttttgaaggatgcgtataatcctactgccccattgccgtataggaaacccataaataggcccgctgacaagctgtggcgatggctgacaaatatggaaagtaataagccggctattgtggcaagcgttggcaaatagcggtgtttgattggcgtcataaactttattatttggataaataggacaatgcctggtatggcaatgactccgtcccatatgtttgtatggataattggaaagtccaaaaggatgccgcctttcttttttgcatgtgtagacgatgaacgaatcattttagtgtgcggcaattgtctcattttatgcgattcttactgggcgaacatgctttagagcactctttttagcaaataaagcagccataagttcgtatgtaggcaacgcgaaaagcgcgctgttttttgtctgttttggtaatatggtatagtgttagcgagatggaaagaagggataagggagaatggcagaaacggttgatattttagcttgcggcgcccacccagacgatattgaaatcggcatggggggaacggttgcaacttacatacaaaaagggtacaacgtcgcttttcttactttaacgcttgctgagttgtcgtcgaatggcgatatagcgagccggcagcaggaagcaaaagcagctgcagaacaattaggagtgcgcgcacgttatcaattggaattgcctgataggggactaacgtacataggcgaggaaaaactggaggaagtggttgacattatccgcttgacaaggccaacgctcgtctttatgccggcggctgaccgccatcccgatcacggtcagtgtggggctctaatcaaagaagccatttttaatgcgggcattcgccgttacggcaatggtgaaccccataaagtaaaagcagcgtacagctattttattaatggctttgccaagcctgactttgttgttgatgtaacagataaccattcagctaaagtggcggcacttcaagcatacaaaagccaatttgttgcacaaggcggagtgcagacgccattaactgatggttatattgaagcagtgattgcgagagatcgtttgtttggcaaagaagtaggggtggcattagctgaagggtttgttgccgagaagccacttgtgatggcaaatttattagaagggtgcgggcgctgacgtggaaaaattgcgaattggcattagctgttacccaacagtcggaggatcaggcgtggtggcgacagaactaggaaaacaactggcctctcgggggcatgaagtccattttattacgacggaaatccccttccgccttgatgataaagtttacccaaacattttttttcatcaagttgaagtcaaccaatacgctgtatttaaacatccgccccatgacttgagtgcggccagcaagattgctgaagtgatcttaactcatgatcttgatttgctccatgtccattatgctgtaccccatgcgatttgtgcgattcttgcacgggagatgagtggtaaagacataaagatcatgacgacgctccacggtacagatattaccgtacttggatttgagccgtctttgcgaccgcttattcgctatgggattgaacagtcagacattgtcacagctgtgtcctatgatctggcccggcaaacaaacgagttagtacgtactgataagccgattcagaccgtttataactttattgacgaacaagtgtattatccaaaacaagtggaacaattgcgggcgtgttacggcctttcggaaacggatgatatcatcatccatatttcgaatttcagaccagtgaaacggattatggacgtgttgaaaacatttcaactcattgttaaaagcagagatgcgaagttgcttttaatcggcaatgggccagaattgccgattgcaaggcagtttgtggaagaaaacgacttgacaaacgatgtcctcatgctaggcaaccaaaagcatgtggcggaattgttgtctatgagcgatttaatgttgttgttaagcgaaaaagaaagttttggtttagtggcgcttgaagcgatggcatgcggtgtgccagtgatcgcaacaaacattggcggcatcccggaagttgttgaagatgaagaaactggttatttatgctcccttgggaacattgaggaggcagctgcaaaagcgatttccttattggcagatgatcaaaagcgccaagcctttaaacgagcggcacttaatcgagtaaagcaatcgtttgattcgcagcacatcgttagtcaatatgagcatttatatgaagccatgcttaaagaggagcggttatgagcatttggatggaaggatttaaagccgttcgcacgttaaacgccgccggtttcgaagcctacattgtcggcggagctgttcgcgactatttgcttggcaaggatgtcgacgacgttgacattgcgacgcaagcatcccctcatcaagttgccgacatctttactaaaggcgtgcacattaaccaggaacacaagacggtgcttattcccggagaaaaaggcccaatcgaaataacgacatataaaggcgagacacttgccgaagatttgcaaaaacgcgattttacgattaacgcactagcaatgacggaaacgagagaggtcattgacccttatggaggcagacaggatttacaaaaacgcctattacgttcatatgatgctcaaaagcgtttaagcgaagaccctttgcgaatgttgcgggcggcgcggtttattagttcattaggctttgaggctgatcggcaattggtaaaggaaacaactgtacaaaaagcagctttgcaacgttgcgctcgtgaacgggtcgtcgttgaactggaaaaactgttaaaaggaatggagacagaggcggcgtttgcgtttttacaggagacaggcgccattcacagccttccgggcattcaaattactgacagccaattagctgaactgatgcgactgccaaaacaacagtgggacagtggcgacagagcctggcttgaatttgcgatttgcacaggcggaccaagcagcatggcggctttgccattgccgaaaaagcgaaaacagctagtggcagcaggactaaaggcgtttgaatatcgccaaaaacaacagcgctggagcgactggcagctgtacatttccggtttggcgatcgctatgcaaatcgaagagattcgtgctgggcgccaattgccgagcatccagaaagaagaattggctgaacagtggtctgccttaccgataaaagcaaaaagcgatttggcgattacaggccgtgacttgcttcatgcaaaagctgcgccaggcccgtggatgaaggaggcgctacaagcagcagaaaaggccgttgtgacaaaaaagtgcccaaatgaaaaggcggcgattttggcatttttaacgatgagggaggatggaaaatgaaaggacagttattggcgctgcttcagtcaggtgtttacatttctggcgaggaaatgagccgtaagctcggcgtttcccgtacagccgtgtggaagcagctgtctgcgctgcgagaacaaggctacgagcttgaatcagcaccgaagaagggctatcgattgctctcttctccagacactttgcttgcgcatgatatcgaagcacatttacaaacaaaaacgcttgggcgaaacatccacagttatgattcggtcgcctctactcaacctcttgcccatgaagaggcagcccgcgaagcccgagaaggcacgcttattgtcgccaatgaacaacaaggggcaaggggcaggcttggacgccaatggcaatctacgaaggggacaagcctgtcgatgagcttgcttttacggccagacattagcgttagccaagcgccgcagttaacgcttttggctgctgtagccgtcacaagggcaattgaggcagtaagtgggttagtttgtgacatcaagtggccaaatgatattttgtatggcggtaaaaaattagtaggcattttgacggaaatggctgctgatcctgaccgagtgaactattgcattgtcggtatcggcatcaattgcaatcaggagagcaatgatttcgcagaaactttagccggaatcgccacgtcgattaagctggaaacaggcaatccggttcaaagggcaaagctagtagccgctgtgatgaatgaatttgaatggctgtacgatgaatatataaaaaacggatttgctgcgattcgcccgctctgggaagcgcgctcagtcagcctccatacgaaactgtctgctcgaacgccttctcggattgtacaaggctattcattaggcattaccgatgacggacgcttgcgcattcaagacgaggacgggcaagaacacttgatttattctgcagacattgaactcgacaactgatggcaaacgtgtgctatactaggtgcgcaagggctgtatctgctagaacggcacccaaaagaggtatgggattgtaacgtaacgaaagcttgcctggatctttcggagaccgggacatagcttcacgttgccttcggctccttgcactaggcgcaaggagttttgccgtttcatgcagttcaaaatttgaacacatgaaacaggaggaccgatgtgaaaacaacaaaaacgtttaaacaaatgaagcgagatggtgagccgattgcgatgcttacggcttatgatgctccttctgcccgcttggcagaacgagctggcgtagacatgatccttgtcggagattccctcggaatggtagtgcttggttacgactccacggttccggtaagcgttgatgatatggtgttgcatacgaaagcagtcaaacgtggggcgccgaacacatttgttgtcacggatatgccgtttttaacgtaccatagctccttttctgaaacggctggccatgtgcgcaggctgttgcaagaggcaggagccgatgcggtaaagctggaaggaggcacagacattgccagcactgtgcaacgtctaacggcagcgggtgtgcctgtcgttggacatatcggcttgacgccacaatcagtcggtgttttaggcggctatcgcgtgcaaggaaaggcgcaagaagaaggcgaacaattgcttgctgacgcacaggcattggaacaagcaggcgcgtttgccattgtcgttgagtgtgtgccaaagcagcttggtgccctgttggctaaagaaatcaacgtgccgattattggcattggcgctggagcagagacagatggccaagtccttgtttatcacgacgtgattggctacgagtcggaacgagtggcgaaatttgtcaaacaatatacggctgtatcgccaatcattgaggaagggctcgcttcttatgtcaccgatgtaaaacaacgggcatttcctgaagaagcccatacgtatacaacgaacgacacaggctggttggctgtgtatgggggcgacaaaaaatgatcgaagtgcaaacaacaagccagttgcaagaacagttgcaggacgcacgtgaacaagggaaaacgattggctttgtgccaacgatgggtgcattgcatggcggtcaccagtcgttggtgcgtgcctgtgcgcaaacatgcgacttggtcgttgtcagcatttatgtgaaccccctgcaatttggccctcatgaggactatcatgaatacccaagacaattggaaaaagaccgcgtgttagcagaagaggcagggtgcgatgtgctgttttgcccaacggatgaagaaatataccccgatgggtatacgcaaacggttcatgtgaaacaaggtgccaacgtgttatgcggcaaaagccgccctggccattttgatggagtagctaccgttgtgttgaaattgtttatgcttgttcagcctgattttgccttttttggtgaaaaagacgcgcagcaagtcgccattattaaacaacttgttaaggagttcttccttcctgtaacgattgtggcttgtccgactgttcgcgaagacgacggcttggcgaagagctcccgcaacgccaatttgacgccagcagaacgccaagtcgcaccgaagttatatgctgccctacgtgatgcagcaaagtcgccgacaagccaactaagcgaccttgtccaacaagtgcggcaacatcttgctgcattgcctctaggctgcatagactatgtcgaagcgtatgagtatccatcccttaaaaaagttgagcaaagcgacggcattgtcattttggctctcgcttaccaattttcgaaagcacgtttaattgaccacatcttaattgacatgaacaatcgcaacggagggttgaacgatgtatcggacaatgatgaaagcaaaattgcatcgtgcacgggtgactgaatcaaatttaaactatgtgggcagcatcaccatagatgaagacctcatggatgcagttgatttgcttgaaaatgaaaaagtacaaattgtgaacaacaacaatggtgaacggtttgaaacgtatgtcattaaagggccaagaggagaagggggcatctgtttaaatggtgccgccgcgcgaaaagtccaacctggagacgtcgtcatcattttgtcttatgcgatgatggaaaacgcagaagcccttgcccatcagccgaaagtggcgattttggatgagaacaaccgaattgtggaaatgttaggcacagagccagcttctaccgtccgttagcacgcatattccctcccctggtgatacacactgaatgaaacaaggcattttgccaatagggggagggatttttttgcattcatggattaacgagtggcaagcactttaccaaaatatttggcagtcgccgactagcaaaagcatggatgatgtgatcgtgcttgaacagatgacgcagcaagtactggatgtttggggagcgatggatgaggcgttgcaccaattgcggcagcggttaaaagaaacggctccaatgtttgtgtacgaatcaaaagggacgattctgttcgatgcccatcagtttgaggaagcgctttgttgtttgaaaaacgaagaggctgaaggcgaaagagaaaatattcgtctgttgtatattgcctatgctttcttatacacggagaaatttgaagaagcgagaagcggctttttatatgtattgcaagtatcttttgatccgctcgtcacccactttgcttacctaggcattggcatcatcgaaatggttgcccgccgagcagaagaagcgatattgtttttagaaaaagcaaattcattaacagacaaccctgatgtcgtgtataatttaggcatatgttattattggttggaagcttacgatagtgctgcagcttattttcactcttatacgcaagtacgcgacgatgccgatgctttgatgttgcttggtctttcgctttataaaggtggaatggttgaggaagcgcgtggcgtatggcttgattgcgcagagaacgttgattcgagcgaagcgcttttggcgctggcaaagctaactgaatggtatggcgaacatgaattggcatgctacagttacgaacagttaatgtttattaacgggaaaacgccggagttgcttcatggctttgcctggaaccaagcattgtcaggagatagccgtgctgttgatttattgttcgagcttggcaagacaagccagcaagcgtatgaatcatggtgcatgttgcaggctgcccaaggagggtaaggcttccgaatagaggtgtaaacgtgtctcaatcgtttgttgtcattgatttggaaacaaccggaaactcgccagatcaaggcgcaaaaatgatacaaattggagcggttaaggtggaaggttgcacgattacggatcggttctcaacatttgtggatcctggttgcagcattccgccttttattacagaattaacaggcatcacggataaagatgtggaaggggcacctgtttttcgagaaattgcaaccgatttgcttgcctttatggaaggctccagtttagttgcccataacgtgccttttgataaaggctttttagaagcgcaattggaaacagaaggattaaggcttccaaaatgttgccaatttgataccgttgaactttcaagggtattgttgccgacgcaggaaagctacaaattgtcagagctatcaagcagccttgatatggaccacgatcgaccccatcgcgctgatagcgacgcagaaataacagcagaactgtttattaaactcttacataaactagaacggctgccgcttgtgacattgcaatcattagagcaagtcgcaaagggattgaaaagcgactgggacgtattaacgcggccgttgattcaaaaaaaatggatgaaagtagacgaagacgaaagagaatatgacttgtttcggcaactggcgcttaagcgcatggcagaggagggcgaaagcagcgagtcatccgaccataaaccgtttgttgaagtagaggacgagcttttttctagtagtggcgctatcgcccgtgtctttgactcatttgaagatcgtccagggcaaaagcagatgatgaaagaagtttacgctgcgtttgaagaacacgcccatgcgcttattgaagccggtaccggcactgggaaaacgttggcgtatttagtaccgagcgcttactttgcttactccaagaaaaagccagtggtgctgtcgacctatacgattccgttgcaagagcaactattgcaacgagatttgcgcttgcttgcttccattgttccttttccactacgtacggctgtcctcaaaggaaggagccattatctcgatttacgcaaatttgaacaggcgttgcaacagctagaaaacgactcttatgacgtttgtttaacgaaagcccaattgcttgtttggctgcttgaaacagattatggcgatgtggaagagttaaatttgacaacaggagggcgcagcttttggccaatggtccaaagcgaccccgagtctgatttaggcaagtacaatccgtggttttcccggtgtttttaccatcgctctcgccggcaagcgaaaaaagcagatttaattattacgaaccatgcattgctgttaacagacgttgtgcaaactcattcggttttgccctcctatagccacgcggtcattgatgaagcccatcatttccaagaggcggcgagcgcttactttgggctaacggctagttttttatcggttagttttgccattcaacgcatcggtgatgaccatcacgaatacggtgccatcgcgcgtttagaaacgctcggggaacaaatgaagcagccgctagcgcttgacgacgcaaaagaagggcttgttcgctttcgagaagacaccgatgaactgttccgaatgatccacgtgtttgctttagacgcacaagaaagcaatgcgacagatgtagggcgtattagttatgtatataaaagcttttcagaagaaggcatgctttggcaagcgattcttgagtgcgcgatgcgcttgcagcttcacggcgagcaagtgctggcggctttaaaggcggcttatcaagtagtcgaggaaaaagtggaagcggaatacgaaagccgttctcttctagctgatacacaaggggcaattgctgcttttgaggaaacggtacaattgctgtatgagctcctccttgaatacgacgacaattatgtttactggattgaagtggagccaaaaggggcaaaaaatgctacttatttgtatgcaaagccgattgaagtctcagaaaggctcgctgaccaattttttgccaaaaagaaaagcgtcgttctgacatcggcgactttgacagtcaaccaatcatttgattaccaaattgacaggctaggcttagttgattttggtgtgaaaacgaaacaaattgagtctcctttttcttatgcgcagcaagcaaaattgcttattccttatgatattcccgatgtccgtggcccagatgacgagctgtttgcacaggacatcgccattaaaatatggcgaattacggaagtgatgcaacgaaaagcgcttgtcctctttacttcttatgatatgctcaaaaaggtattttattatgtaaaggacttaaacgacgaaggcaaattggcgttaattggccaaggagtgaccagcggttcgcggatgaggctgttaaagttattcaaacaagctgagcaaagggcagtgctgtttggcacaaatagcttttgggaaggaatcgacctcccaggcaacgagttggagtgcctcattattgtcaggcttccatttgcaccgccgaatttgccattaaaccgggcacaaatggagcgagcaaaagcagaggggaaaaacccttttactgatttggctctccctcaagcagtcattcgttttaaacaaggatttgggcggttaattcgtacgaaaggagacagagggctcatctttgtttttgaccggcgaattgtaacaacccgttatggtcggacattcatcgattcgctgccggatgtaccagtatacgaagggaagctggaaaggttgcttgaagaccaccttgactttagggaggaacagtcgtgaagacgatcatcaaaaatgcaaaagtaataacgatgaatgaagcaaggacgatacacgagcatggctatgtcatcattgaagacggcgtatttacggcgattgagcacggggagccggcagaagaggctgcaaaaggagcgaatgtagtcaatgctgataaaaagtggctcatgccggggctaatcaacacgcacggccatacaggcatgtctttgttccgtggcgttagcgatgacttgcctctgtctaagtggcttgcagaacacatttggccactggaacaaaaacttgaccaaaaagcagtagaagcagcccgccttttaagtatggtggagatgattgaatctggaacaacgacgtttttagaaatgtaccatttgcatctggacgatttcgctgcggcggttgaagaagcaggcatgcgggcaacattgatgcggtctgtgatcggcctctgttcaaaagaagaacaggaagaaaaattagcagaatctcttgggtttgcaagaagatggcataaacaggcaaatgggcggattcaaacgatgctcgctcctcacgccccgtatacatgcccgcctgattacatcgagcgcattgtggaagctgctcgccaagaaggtttgcctgtccatatgcatcttgctgaaacaagaaaagaaatccacgattatatggatgaatatggcatgcatccagttgagcttttgcaagaaagagatctacttagcgggacagaatggctgtttgcccatggcgtccatatgcatgagcagcattatgaactgttgggcgctcatcaagcagctgtttcccacaatccgaaaagcaatttgaaacttggctcaggcattgcccaagtagcaagtatgcaaaaacacggcatcgttgtttcccttggcacggattcggttgcttccaataacgctctcgacttatttgaagaaatgcgcacagccgtgttgctgcagcggggcattaatgaacaagctgacattgtcacgacatgggaaggattgaatatggctacgtccaacggtgcgaaagcattgcgctttgccaatctagggacgatcgaagtaggtcagcaagctgattttattatgcttaaccctgaacaagcccacttgcacccaagcagccaggctgtttcacatcttgtctttgccgcgaaagggtctgatgtaacggacgtgtatgtccaaggggcgccgttaatgaaagacaagcagttgcttacgctagacaaagagcgaattttaaaggaagcgaacgaacagcttcgccgcttgcaacaatgaacacgcgcagttaaaaaacgctgcggcgtccgcagcgttttgaggtgtgggtagaaggtttttagtcagtttcagcctgcgtgtctgctccttgagcagaggttgcgacaaacatcgccggaaatgcggtttgttttagtgtgaacggccagacgtcttcaatggactcattggcccgacaaagcaaagcagctttgtctttgttctgctgaaaccactcggctaagccatattgattcatttaaaaacgccccccttcaactggcgtatccttagtatggcacgaagggtcggggctatgtttagcaatgattgtgggtgagtgtagatattggcgtgtataaacgaaggaaggggcgtgtcgttttggagcgttcagatatgaaaatgaaagtgctgtcgactgtgacagtggagaaaacagatgatttttataaagtagtggaccaactaaatcgaaccttaaaagacaagggtttgacatttggctacgcgcttgatgaaaaggatcattcaaaaataacaatgacgatttatgaagtgtgagtggaagcgaatgaaaaaaaagctaagcatcattttttctgttgttttacttattgtaattgggcttgggatttacctgtatacggcgattcgtagtccattaaccgagggagcaaaagaagcgactgcttttgtgacggagcaagggatgatggccgaagtggacgacgtgtctttttaccatggagaagaaagctattggatcgtatctggcacgagcgatgagggagaagccctgtttgcgtgggtaaacgacgatcccgaaaaacgggagtcaacgcttgtgctccctcaacatgcaggtgtgcctatagaggaaatgaaagaaaccgttgcccaagaattaggcgttaccgcttttgattccgtgcgccttgggtatgaaaacggccaagcggtttatgaatttacgtatacatcggatacgcaagggaaattattttattacaccgcttttgaaacaggcgaatatatgaaaagctttagtattcgcacgaattaatgctaattcattcgccaattgacggcgaaaaacagatgaaggtataataatgaagtcttttttagagaacggaaaatgtcgtttggcaggaggagtcacgagtgaaaacaacaatcgcccaagtgggacgttatgtcaatgaacaagtaacgatcggcgcatggattgctaacaaacggtcaagtggaaaaatcgcatttttgcaactgcgagacgggacaggcttcattcaaggagtcgtcgtcaaagcggaagtgcctgaggatgtatttgcgttagcgaaatcgatcacgcaagaaagctctctttatgttacaggcaccgttcgtgaagatgaacgctcgccgtcaggctatgagctttcggtagaacagatcgaactcattcaccaagcgactgactacccgatcacaccaaaacaacatggaaccgagtttttaatggatcaccgccatttatggctacgttcaaaacggcaacatgcaattatgaaaatccgcagtcaaatcattcgttcgacgtatgactttttcagtgagcgtggctttacaaagttggattcgccgattttaacaggcagctcgcctgaagggacatcagagcttttccatacaaagtattttgatgaagatgcgtacttgtcccaaagcggccaactttacgctgaagcaggagcgatggcgttagggcgcgtttttacatttggcccgacattccgcgctgaaaaatcaaaaacacgacgccatttaattgagttctggatgattgaaccggaaatggcatttgtggaacacgaggaaagcttagagattcaagagcagtatgtggcccacttggccaaagctgttcttgaccattgtcaactggaattgaagcaacttggccgggatgtaacgaaactggaagcaatcaaagcaccgtttccgcggatcacctatgatgaagcgcttgatttgctcaaagaaaaagggtttgatgacattttatggggcgatgattttggctctccgcatgaaacagcgattgctgagcatttcgacaaaccggtgtttattacacgttacccaaggtcattaaagccgttttacatgcagcctgcccctgatcgtgacgatgttgtcctttgtgcagacttaattgctccagaaggatatggagaaatcattggcgggtctgaacggattcatgattacgatttgcttaaacaagaactggaaaagcacaatttgccgttagatgcgtatggatggtatttggatttgcgtaaatacgggtctgttccccattcaggctttggcttagggctcgaacgtacggtagcgtggctgtccggtacggaacatgtcagggagacgtttcctttcccacggttattgaaccgcctgtacccataaacagaacgaggctggccttggaatttttcaagccggccttttgttttttcccaaccgtcccttagcccatggtatactatagcttcaagaggtggtttgaatgaatcagcacgtatttttaaaatgggcgcagcaaaagcatttatcgatcccttcgctgctactagaacattataccgatctacaactagacgagtatgaattcgttgctattttgcacattcagtcgtttttagatggaggcgatgcgtttccaactccacagttattaagcgaacgcatgtcaatcaacctcgatgattgcgccaaattaatcggtgcactcgtgaaaaaaaagctgcttgccattgagaatcgccttgatgatacaggggttttttatgagaactatacgcttgaaccattgtgggccgcgttgatccgtttgctcgaacaaaaaggcagagacgtgcagacaaaaacgcaaaaaaagcaagaaggggagctgtatcaacagtttgaacaggaattcgctaggccgctttccccaatcgaggctgaaacattgtccatgtggctcgacgaagacaagcactcggctgaattaattagcgccgctttgcgagaagccgttgtttctggaaagctcaatttccgttatattgaccgaattctgtttgaatggaagcgcaatagcattaagacggtagaagaggccaaagcccatagcgagcggttccgtaaaaaaagcacgtctaaaccacgaagagaaacggccaatacgcaagacattcctggttttcattggctcgaaaatttataaggagtttcgcgatgttgtcaaaaaaagatacacaatatgcaattgatcaaatgggagagctttttccagaagctgaatgcgagctaacccattccaatccgtttgagttgttaattgcagttgtcctttctgctcagtgtactgatgcactcgtcaacaaagtaacaccgaagttgtttgccaaatataaaacgccagaagactacgtgcaagtccctttagaagaactacaagaagatatccgttccattggcctctatcgaaacaaggcaaaaaacattaaaaagttgtctcagtcactgcttgagcattttgatggacaagtgcctagagagagggaacagcttgagtcccttgctggcgtcggtagaaaaacagcaaatgtcgtgacaagtgtcgcttttggcgagccagccattgccgttgacacccatgtagagcgagtctcaaaacgccttggcatttgtcgttggaaagacaatgtccgccaagttgaagagacgctaatgaaaaaaattaaaaaagaagattggtccgatgcccaccatcgactgattttttttggccgttaccattgcaaagcgcaagcgccgaaatgcccgacatgtcctctgttagacatgtgtagggaaggaaaaaagcgcatgaaaaaaagcatggttgaagcatgaacagacggatgcgctaaatttgcaaatacgatagagaaaatagaaaggaagacagaagtgagcggaatgactggaacgacgactgtagagtggacagaaaaagaaaagcaaaattggcaggcgattgagacaaagcaatcgtttcgcctcgcttttagcggccatttttccgccgggaaatcgacgcttctgaatgagcttcttggtgcgcctctgttgccaacgagcccgattccgacaagcgcaaaccaagtaatcattggccaaggcgacattcgtgttgtattagagaaagcaagtggcgaagaggaaaactggcaaggggcaattgattgggatgctgtcaaacgttcaggcatggacggcactaaaatcaaacggctgcgcatttatgcccccattccttttttaaaacatggcagcgaacttatggatacacctggcgtcgactcgacggatcctactcatcaacgtgtgacattagatgccctttatacaaccgatgcaattgtatttgttatggattataaccatgtaaaagcggaaacgaacctctattttttaaaacaacttagcacagaaggaaagcctctgtttttagtgattaaccaaattgataaacatgaagaaggagaactttcgtttgctgcatacagggaaagtattgaaagcacgcttaaagaatggggcatccgttatgtaacgatttattatacgagcatgaaaaaaacaggtatccctgaaaacgaactagtccggtttaaacaggaaatgaaagcattgcttttagccggcaaccgcttagctgaagcaagcaaaaaccggttgaaacacagtttttataaatctgtgcagcggcgtctccaggaagaaaaagacgaagcggttcatctccttgatgaacaggcagctgcccaaggtgcctctttcgaaacgctgctttcttaccaagaagagtacgagcgccttgagcgcttaaaggatgcgcatcaaaacaggcagagtcaattccagggtgagtggcaatcgcttttccgacaagcgacattgtttaatgctgcgcttatggaacaaacgcaacaatggctggaaacccttcagccaaacttccgtgtcggttggtttttttctaaaaagaaaaccgaagaagagcggatgcggctccttaaacagttaacacgagcgttagacgatcaaatccagtcgcagcttgtttttcatgtcaaacgttctttgcaaacgattccagtagaccgtttagcaaataaagaagcatttcttgaagcggttgagcgcaccgctttccacattgatgagtcgtttgtaagcaagcacgcaccgacggaaaccgtcgggagagagtacgcctaccaatttgcgaaagaacgcacagacgagattatccgtgaggtaaaaaaacgggctaatgctgctttagaaaaagcacaagctggcttgcgaacagcagatcaaacggcgttggaaaaaggaaaggctgaacttgaacagcatcaacgcttaaaaccacttgtcgaaaaatgggtacaactcaaccaagcctatgcgaatcaagtggaaagccttgaaagtgctgcgaaaagagtgagcgacaacggtgcatttgaacaggcgttgcaggaagcgcgaaaacagcagctgccagaagacgagcagcaacagacgaattgggtaaaagacatcgtcttttcagacgaggcgcttttcgctgcagaggagcaagagaagccaacagagcggctgcgttttagccatgaaccaaacaaaagcgctttgcgtacgctgctccgtcaataccaagcgaacatatggggcagcgagtggcgagagcgccttgaacgtcgcctcaagcaaatggaagaacagcagtttaccatttctttgttcggtgcttttagcgctggcaaatcaagttttgccaacgctctgcttggcgcggatgtcttgccaacatccccacatccaacaacggcgacggtcacccgtgtgcagcaagcaaccgattcatttagccatggcactgtccaaattcggtataaaggctatcaagagctcgaacaagaaattgcctcgatcggcaaactattgtcgctcactcttacaccagaaacattaacatcctttaagctggcaggtgtcaaaactgaaacagctgccaaaaagcaagcgcgtgcctatttacagacgcttgccgctagcttgaagcaaagagaaatgttgttatcgacaacaaccactgttccattaacagaacttagtgaacttgttgccaacgaagcccatgcttgtttaattgccgatgtgtgcatttactacgattgcctgttgacaacgcaaggactgacgctcgttgacacacctggcgtcaattccattcatggccgtcatacaaatgtcgcttacgaacaagtaaggcgttcggatgcaattttttatgtaacgtactacaaccattcgttttctaaaaccgatgcccgctttattgaacaacttggtaaaattaataaacaattcacaagcaacaagctttacttcgttttaaatgcggttgatttagccgctaatcaaagcgagcaaaaaggggttgaggcatatgtgttacgttcgttgcaaagcgcgggggtagaaaacgctgctttgtacccaatatcgagcaaaattgccttggccgaaaagcgagcaggcaagcctgtaactggattgtttgctgcatttgaaaatgaattgtacggacgaatgctgcaaacatttaaacagctgaatgtggacattctttatgaagaggtcgcagcatataaccgctacttacaacaaatggctacttatgcaaaagcgggggcagggagccaaaaacaacataaagacgaaataagcgaatcgcttgcgcaaatgtacaatgcgttttgccgggaagcaggggaaccacttaaacagcggctccagcaagaagctagcgaattgtttctttatttgcgcgaacggatgcaatacatgttacgtgatgggtttggcgaacatgtaaatgtcgcgactgtacagggaacgacaaaaaaagcacagcgtgaatcactagcaaaagcgttgcgcgagtggggagaagacagcagttcatttcttgcccaagaagcgagggccactgccgttcgtttgacgctatcatttaaacgccattataggcgttggttgaaagagtgggagcaagcgattcagcaagcttatgaagcattttatttggaagagcaagaaacaattccgtttgcttttcaagtggaaccccctgatattcgatttgatactgagcgatatgcaaagaactttcaatcgcttaaatcgctgtttgaaggcggagaactggaccatgtaaaagaacaagcggcagcagaactagctgcttcagctgttgcttatgtacgcgatgaggaagcgcgttgcaaggaagcagtcatccaagcggtacagacggcctttatggcagagaaagatcggatggaaagcgccattgcattacagttgcagcggcttgaaaccgttagtagccgggagtttgcccagcaaatggaacaagaaagcacctcattacaaaactggcttgaacaagagacagcaaaccaaaaggcgcagctataagctgcgccttttggtttgcgacaaagtcgataaccgcccctcagactgatagaaagcgcttgtcagacgaggagtgcaggcgagggaagatgcgaatagaacgtgggttcatgagcatatgaccgagacaaacgacgatgtatgcgagcgtttggctacagtctgaaggagttgtcccaaaaggtcatagataaatgaccttttggggtggcttttttgcatttagataaaaaagcacaaaaaaaccgcccaatcgtttaaaatgaaggtaccactaccaaaattcaaacgaccatttaaagataagtaaagtaggaaacggttggcggtcccttcagaggtccctttagggacttcgttggtaaagtgcccttatagggcgaaattaaaaccgccggttctaccggcggatacttactttaaaggcttttgggacaacctcttttgttattcctcagaactgctgtcgctttgagtcgatgaacttccatcggatgaattgtctggctcattaggcggcgtttcgtttccgttattattgttgccgttcccgccgccattcgtattgtcattgccgttccccccgctgttcccattatcattgtttccattatcggaaccagggttagaaccgtcattaccgccattgtctgttccgtctccgttgccatcatcgttgtcattgccgccatccgcagggtctgtatctgaacctgtgtctgaatcagagtctgaaccatcgttctcgccattgttgttttcatcatcgttgccttcatcttcatcaggcggtgtttcctcgccatcgtttggctcttcttcctcttcttctggctcttcctcttcttctggttcttcttcctcttcctcttcttcggtcccacctggaattgttgctgttactgaaacagccgcacttcgtagacctgttccgtccgttgcctgggctcggactgtaaaggtataagattcacctggtgtgactcccgttaagacagcttccatgctgccttcatctacattaagggaaccgctgctgacagaagtggagaacttgacgtcatcaacttcatcggcaggataagaccaagagaatgtcacactgttcgattcttcgtcatacgagtagctgacgttggttgggtcagaaatactagcaaattcctgcgatacttctgtaggaccagtgcctttgacaaatagctctgtgacaatttcactgcttggcgtccctgcactaggcagcttgccggtgctgcgttcgacacgcatctctacaaccgaatcgggcttcacaaaatcaggcgtatcgatgccttgatggacttccgtcataatgtgtttaaacattctttgcgccgttttgctatgggcgctcgtcaagtagttgccttctccattttgcgaaaatccaatccacacagaggcagtatagttggtgctatagcctgtaaaggaagaagccgggaatcccccagaagggatgttgtacttctgcatcgtttcaggtacatagttcgttgttcctgtttttccggcgattggcacgccaggaatttgggcttctttgcctgttccggcagtgacgaccgtttttaacatatcagtaatcatgtagccagtatagtcttccatcacttgcgttggttcaggctctgtattgagttcccggccgtctggaaacacgattttgcgaattgtatatggttcatggtattcgccgttgtttccaaaagcggcatacgcgccggccatttcttttgtagaaacttcagcaccaccgagtgccgctgattcataacggtcattttcatttacgacaaacattttatcaaggaaggcaaaggcattgtcgacgccttcttcattgatggcttttacagcagggacatttcgtgattctgccaatgcttgccgcatcgtcatcggccctttatacgtccggtcatagttgcgaatctctttgctggcatcagattgataagtgtactcttcatcaacaaagattttagctgttgaccattgttgatcgttaataccaggtgcgtaagagagcagcggtttcatcgccgacccttgctgtctacggatagtcgcatagttttcgacacggggatcgttttcgtcaatgccatttcccattgcgcgaatcgcacctgtttgcgtttcaagcagcgtgacgccagcacggaaatcttcgctttctgggaagacgagatcggcatattctcccgatttcatgacatggtcgacatgttcttgcgcatccatatcaagtgttgtgtagacttttaagcctgaattgtaaatgtcatttgtcgacaagtcgctcatttcttccagttcggttaacacttcatcgtaaaacgttaaatagtcgctgttttcgctttctacataatccagttgctcttcaatcggtgtattgcgtgcttcttcagcttcttcagctgtgataaagccttcccgttccatccgatcaatgacgacattgcgccgcttttcattgttctccggatttcggtgtggatcaaagtagcttggccgctgtggaatggctgcaagcacggctgcatcggcaacggtcaaatcgtttaagtcttctttgttgaaatatttttctgctgctaattgtacgccgtaaccagccgatggcccaaggttgatttggtttaagtacatttccaagatttcatctttcgtataacggcgctccagctgaatggccaaatactgttcttggatttttctcgttaatgctttttcattagacaaaaataaatttttaactagttgctgggtaatcgttgatgcgccttcagcgccaaacccttcgcggaaattggccacaacggccccgccgaggcgcctcaaatcgactccaaaatggtcatagaagcggtggtcttctacagcaataaaggcattttttaaatggtcaggcatttcgtcaatattggcatttatccgcttttccccagaggctagcgtataaacttgctcatcattcatatcaaaaatctgcaatgattgtggcagcgtcaagcgctcttcgtcaatatcaggtgccccagctacaatagaggcaacggtaatcccgccgccaataattgctaagccaattaaaatcgccatcgtggtaaagatttttttccatacgcttcgtttcttcccaccattttttggcgttgtgccatttttgctgcgattttgggcttttttgcgctcctgccttgatttatactcatctgacatgtcttacgtcctctcctttgcatccccattaaagtaaacggcgtcaagcgtccgcaaataatcaatgggcggatgcaggcccgtttttacttggtgtccaagtcgttcaatctctgtttttttaatcgacttccgtacgtcctgattgtcataataatcaattaaatgtttggcatcaagtaaaaaaacttctgccgattgaaaaaagcgaatgagcacaaaacaaatgccgccgtgtttgctgacttcccgcatgtgatcaacttggtggggatgaatgtttttcagcgggaacgacgttttgttttttgtttcttttgcttcgaaatcgatataggcgcctcggtaaacgccattataatctgtcgttgaagcttgcttaaaataagcctcacggatgacagctgcacttcgttttgggtaatcaactttgacaatttgtaccggtgtcggttttttatggacgactgcccgttgttggctcaaataatataaatttgcctcgtcaatgtcctgctcgagtgtcatgccgcgaccgctatatgtatcggctggtagtggcttttttgcttgcccttgtttagggctgcgtgagtagggctgtccattcgggtaacgaattggcatttgcccacatcctttccaaatggcttttgtatgttttttgtctatatgcggaaaggtaacaaagcatagtcattctttcattttagcatatttgtcgtccgagtagcggaacagaacacgcgatctgttgaaaaattaacgaaaaaatgagggaaagcatgggatgaaagggatcattcgttttaacaatgtcgataatattgccaggacgaaagcatacgaggcattcggcaggcgtcatcctgaaattcgctgggcacggcttgctggaatcgtgtcccggaatgcaggctggaatatgactgaccttgccggtggcccacttgctgcgatcatgcctaaagagacgaggcaagcgattgtctctgtttatgagcgtgccaactggctgatttttgcagatgcctttcctcaattgcaattatatgcaaaatggaaacgaacgaagaaccctcgttttcaagagttggaacaattctttgtgtctcgttttatgatcgcagaatggcgtcgtttttgggaagaacgtgatgaaatcaggttaatgactgccttgattattaacgaacagctcatgttgcagaggcgttttttagatgagccagcattggaatcttttttccattctgttttttatacgttaaacgagctagctcattttagccatgttattttgccaacgccaacgagctcaggatatgctgagcgggtgacgaattttgccgatccaacagcgcgtattgcccttggcaagcgaattgccgctgtactttacgatgcagagaccgagtcaaccatcttccaatttacaaacaaacaagagccaaccgggtcgcggaaagagtatgaccgattagagaaagcgttgccgctacggcttgtttatccgcgttttcgtcacaaagcagcacctcgcaccgagtgggccgatagccacgacctagaggaagtggaatcgttctttaaaccaattcgtgttcagcctgtattggcagagaaacagcgaaaatgggcaaaatgggaattggcattgctagcccaagttgcccgctggcgagcaaaataaaaactgcacccttttccggtgcagttcatttttttagtcatcgacgtttttgattgtgctagtcattcagctggccggtttggaccgcctaattttttatcgcctgtatagcgtgttttttcactgttggtttgggtcttagcgtttgtttttccttggcgatgatcttttttcattacggaaaacctcctttctttcagtatggataaaaaccgattcgtttatgtgttgtcgaaaaggggtgaatgaccgctgctaatcctagaagagaacgactttctttgttgaatccgttctagttttgtcaacagcgtaggagaaacaaaatgttgggcgaatcagtttttaaacaaatggagttaaaggaggtcattgtatgaaaacgaaagaaatgtcagaggcgattggcgtaaatccgaccacgattcaaagatggaccaaatattttaaaattgattgcgacgtaacggaacaagggcactttctttataccgaaaaacatctgcaactatttaaaaaaataaagcgtgagcttgacgaagggaagcgcatgaaggacatcaacttgaatgaacgccaaggccaaggggagccaagtgttcctacaaagcaatatgaagcaaagcttgaaaagatgttggtgcaagtggacgccctcgaagaaaagctagcgacaaaagccgatgacgtggtcagttaccaattgctcaagcatcgaagcgagctcgatgaaatgatgaaactagtcggaactcttgaagacagactgttgttcattgaaaagcggatgatgagccatcatcaccaggaaaagcaagtagtcaatgaacatacgccgaagaagataaagcgcggaccgtggagatcgtttatgaacttgtttgccttttaaacgaaaagatatgctacactttttgctgtgggaggtgtagccagtggatactttaaagtcattaacagaggagctccttgctttaacagaggaagccgaacgatactatattgaagtagtgaagcaggattcgacctatgaagtcgattttcatcatcaggtcaagccgtttgccgataaagttcagcccttagcagcagaatggctaccaatcgccaaagcattcttagtgaaaaccaatcctcgagatttgcatgtcagtcagcttgaacaaacggttgagaacttagatgtagtggcgattaagtcgttttatccttcatctgggatgaagcgccaacgtgaaacgtttaaatcggttcgttatgtgctaagcggtttgttggctgaaatggaacgagttgcgtctgaacaataaacgcgtttggttcgaatgaccccaggcccgacaaatggaagcaagcccacacatttgtgtgagcttgcttcttttcccatttagcctttatcagtgatagttaaaaaagcgagaaaggcaagtgtagcgacagacaaaatgttgaggataacgcgtaaaaaaccgtcattctcttcaacttgttcagttgattccgccgcagcggcaagcacagcaggctcataagcaagcacaacaatggctactataagagcggcagcaaagagtcctttctttaacatcagacctctccttttccaataaaaacggatatgtatctcatctgcaaacgttctcactcctattataaaagatcgtttgagcttgtgcaagaactccttagctaagggtttcagaattggtggacgtatgttagaataaataccattgtatctatacacatacccgagggaatgtgcacgacgaaaggacgtttgtaatgaccacgcatttacaggatattattcgagcaaatcaacaaattaaagatgtcgtgacgcatacacctttgcaaaaagatcaggttttgtctgaacgatatgattgtacagtttatttaaaacgagaagacatgcaagttgtcagatcttttaaaattcgcggcgcctattaccaaatttcttctctttcaaaagaagaacttgccgctggggttgtatgcgcaagcgctggaaaccatgcacaaggggttgcctactcatgccgcgctttaaaagtcaaaggtgttattttcatgccgactaccacgccaaagcaaaaagtcgcacaagtgaaattttttggcagggactatgtggacgttagattaattggcgatacgtttgatgattcttatgcggacgccattcaatactgcgaagaacaggaaatgacgttcatccacccatttaaccaagacaaagtgattgccgggcaaggaacagtcgggcttgaaattatgaatgacattgaggaaacgccagactttgtgttttcatcaatcggcggtggtgggcttattagtgggatggcaacgtatataaaaagcgttagcccgtctacgaaaatgattggctgtgaaccagccggtgctgcatcgatgacagaatcaattaagcaaggcaacgttgttgagttagacgaaatcgataaatttgtcgatggggcagctgtgaagaaagtcggcgacaaaacatttgaaatttgcaaagagctgctagatgacattattgttgttccagaaggaaaaatttgcacaacgattttaaacctttacaatgagaatgcgctagtcgctgaaccggcaggggctatgcctattgctgctcttgatttgtatacggaacaaattaagggaaaagtcgttgtctgtattgttagtggcggcaacaacgacatcgggcgcatggaggaaatccgggaacgttcgctcatctatgaagggttgcagcattactttatcgttgaatttccacagcgagctggggcgctacgtgagtttattaccgatgtgctcggcccggaagacgacattactcgctttgaatatacaaagaaaaacaataaatcgaacggtccagtattaattgggattgaactgaaatgcagcaaagattatgatgggttaatcgaaagaatggaaaagattggatttgcctataatgaagtcaacaaggatgaaaatttgttttctttgctgatttgagttcgccggttacactcaggagcacgaattagaaatgaattcagaggaggaatggcccatgcgtttaaaaggaaagcgcgttttagctgcagttgatgcagaatttgaggatttggaactttggtatccggtcatccggttgcaagaagaaggggcggatgttgtttttgcaggggctgaagcgaacaaaacgtatataggcaaatacggtgtaccagcaacgagtacaattgcctttaacgaagcatcaacggacgaatttgatggtgttttagttcctggcggttgggcgccagacaagctccgccgttatccagagtttctttccttcattaaggaaatggacaagcagaaaaagccgatagggcagatttgccacgcaggttgggtgctcatttcagcaggtattctgaatggcaagcgagtgacgagcacgccaggcattcgcgatgatatggaaaacgctggcgccatttggcatgatgagccagttgttgttgacgggcatgtgatttcaagccgccgccctccagatttggctccatatggcaaagcatttgccgacgcacttgcaggtcgataaaatggaactgcactttttaggaacaggtgccggtgtgcctgcaaaaaaacgcaatgtcagtgccttggcgattcggtttttagagcgcaacgggacggtgtggttgtttgattgtggcgaagcgacacagcatcagtttctccattctccgttgtctttggcggctgttgaagcgatctttattacccatttgcatggcgaccatattttagggttgccaggattgttaagttcccgctcttttcaaggggcggaaacaccgttagacatttatgggccaaaagggctagaggcctttgttatacaagcattggaaacgaccaaaacaaaattgcgtttcccgattcgcttccacgtgcttgcagaaggcggtatccgtgacgaagaaaaattgagcgttgatgcattggcgcttgatcatcctgtggaaagttacgcctttagaataaaagaacaagataagcctggaacactcgatgcagaagcgttaaaagcaatgggcgttccgcctggccccctttatgcgcaactaaaaaaaggggaaacagtcaaactcgctgacggccgcatcgttaatggaagcgcgtttttagatgaatcgattcgtggacggacagtcgtcattgctggagacacggcgcctataaaagcgatggaggcgtttgcctctggtgccgatgttcttgtccatgaagcgacatttgcatcgaacaaaaaagacgatgcccatctatatgggcactcgacaattgccgatgcatgtgcgttggctaagcgcgcagccgttggccagctcattttaacccatgtttcctctaggtatgcccgaaatgaaaacgaataccgcgacgaagcggcagcgctccttcctaatgtcattattgcggaagatctgttcgtgtttgaactcgaaaaggcaggccggaaaaaacgtgattaatatttcttattccgagctccgcgcagcccttgacgcaggcaaagagggatgggtctatgtccattcacctttttgcggtgcttgtaaaaaggccgagcagatgctgtcgatcatcgaggaaagcaaagaaacgttttcgttttggcaagtcaacatccaacttgcgccagagtgggcgaggagcgcacaaattgaaagtgtgcccgcgttgctttattataaaaagggtcgcttgcaagcgaaaatgtaccgacttttctctgtcatggaaatcctatcgaacatgaaggaggtagaaaacgatgtcaatggcttatgaagaatatatgcgccaagttgttttgccgatgcgccaagaactgactgatgcaggatttaaggaattgactaccgccgaagcagtggaagactatatcgctgacgctgaaggaacgacgcttgtttttatcaactccgtttgcggttgcgcggctggactagcacgacctgctgcgatttactctttgcaacatgaccatacgcctgaccatttggtaacagtctttgctggccaagacaaagaggcaacagcagctatgcgcagtaaatttcctgactatccgccatcttcaccatcaatggcgttattaaagggaacagaagttgtccattttattccccgtgaagacattgaaggagcagaaccagaggcgattgtccgcaatttagcactcgcatacaacgaacattgccaaaaataatgttgtcgacaaacggtaagagcgttttcctaaggggggaaggcgatggatttttcattgccgcaactttcaactaaccaaacatggcaattaagcaaagaagccgcagggcgtgcggtgatgctgacattttggacgagttggtgccccgattctgaacgggatttagcggcgaaaatgccactagctgcccatgccgatcaaaacaagctgcaatttgtcacagtcaatgtaacgggccgcgaaggcaatgtcgatttacaagcttacttacaaaaaagaggatgggactttttagttttgcaagaccgcggcaccgctttgtacgaccatttcaactgtaaaggcgtgccgacgacggtcctgctcaacaatcgccatgaacaaacagcccagtttggagaacaggcgaagttacctgacattctcgcagagctagccctgctaatcgattagctcctattaaaaaaagcaagccgaaatggcttgctttttttaattaggccgcaccgcgtaataaataactgcgctcattgcttcaatattcggatagccgctttgcttgtaaatttcaaccacatgttcacggttataagggacgcgatttaattggacggagtggctgccgtcctctatgtccaaaataatataagaagcaagaggatgaccatcgaatggcatgccaacactaccagtgttaatgacatttttgccatggagcgagcggacataaggatggtgggtatggccgtaaatataaatgtctgcttcatcgcgcaccatgagctcattttcgattttttctgtttcatccccatcaatggctgtaaataagccagaggggcttgcatggaaagcgtggatgaccaaatcttgcccatcgtcaatgacaagttctgtcggaaggttttttaaatagtccaagtcttcttggcttaggcgacccagtgtccaatctctttctttgttaaacatttcaaggcgctcaacgggcacttcgccatctttaaagccccgcacgagccactcatctgcatttcctttgatgacacgtgcgccagaagcttgtactagttccagcacccgttttggttctgggccacgaaagcaaaggtctcctaatatgtacgtctgatcaatttgcttcgtttgcaagtcattcaagacagcttcaagcgctgtagcatttccatgaatatccgataaaaaagcaaatcgcataattttaagcctccttttatcatattgtaacagatgtggtgcaaaaatgtgtactagaacatttcaagcataatcgtcgcgctagcaatcgctttttaggctgtggtagtatggaaaaagaggaaatggtgacaaaggaggaaacatggatgtatattcgctcaattgaaccgacaccaagcccgaacacaatgaaaatcaacttaagtgaagcagctgccggtacaagcaccacgtaccaagaaaaaaacaaagcagaggcgccaacgtttattcaacagctttttgacatagaagggatcaagcaagtttaccatgttggtgactttttagcagtggatcgctatccaaaagcggattggaaagcgattttgccgcaaattcgtaaacaatttggcgaagaaccagacgagcaagctaaaggcaacaccctacatgatggctatggcgaagttcacgtgcagatccaaatgtttaaaggcattcccatgcaagtaaaggtatcagatggtgaagaagaagtgcgagaagggcttcctgaccgctttgcccaagctgtagcgcaagcacagctaccaaacgacaatgtggtgctagagcggaaatgggaagaacaagcgcctcgttatggcgagctagcaacgattgcaaaagaagtagcagctgaaataagcgctgcttacccagaagcaaggctcgacagcttaatcaagcttgctaaaggagaaaaagcggcagccgaaagctttgccgcccgcttcaaagaagtgacattggaaatgctgcaagcagaagattggcgtgaccgttacgctgcgcttgaacaaatggatccaaaagagaaagacttgccggtgttggaaaaagcgctcactgatgaaaaagcgtcgattcgtcgtttggctacgatgtatttagggatgatcgagacagaatcggttttgccattgcttgaaaaagcgttgaaagacccttctgtcactgtgcgccgtacagccggcgattgcatgtcagacatcggctcagaaaaagcgattccagccatgatcgagtctttaaaagatgaaagcaaaatcgtccgttggcgggcagcaatgtttttgtatgaagtaggcacggaagaagcgatccctgctttgaaagaagcagaagacgaccctgaatttgaagtggcgctgcaagtgaaaatggcgttagcgcggattcaaggcggcgaagaagcaaaaggttctgtttggaaacaaatgacagaggcgcgtaaagg

(The sequence listing continues in the following parts.)
